(19) United States
(12) Patent Application Publication
(10) Pub. No.: US 2024/0173436 A1
(43) Pub. Date: May 30, 2024

(54) COMPACT PROMOTERS FOR GENE EXPRESSION

(71) Applicant: HUNTERIAN MEDICINE LLC, Cambridge, MA (US)

(72) Inventor: Vinod Jaskula-Ranga, Cambridge, MA (US)

(21) Appl. No.: 18/285,369

(22) PCT Filed: Mar. 31, 2022
(86) PCT No.: PCT/US22/22920

§ 371 Date: Oct. 2, 2023

Related U.S. Application Data
(60) Provisional application No. 63/168,708, filed on Mar. 31, 2021.

(51) Int. Cl. A61K 48/00; A61P 1/00; A61P 11/00; C12N 15/86

(52) U.S. Cl. CPC A61K 48/0066; A61P 1/00; A61P 11/00; C12N 15/86; C12N 2750/14143; C12N 2800/22; C12N 2830/15; C12N 2830/42

(57) ABSTRACT

The invention relates generally to compact promoters and their use in expressing genes, e.g., for treating disease.

### CROSS-REFERENCE TO RELATED APPLICATIONS

[0001] This application claims the benefit of and priority to U.S. Provisional Application No. 63/168,708, filed Mar. 31, 2021, the entire contents of which are incorporated by reference herein.

### FIELD OF THE INVENTION

[0002] The invention relates generally to compact promoters and their use in expressing genes, e.g., for treating disease.

### BACKGROUND

[0003] Adeno-associated viruses (AAV) provide a safe means of therapeutic gene delivery; however, a significant technical obstacle limits an AAV vector's utility: its small payload capacity. The large size of certain genes, including for example, the Cystic Fibrosis Transmembrane Conductance Regulator (CFTR) gene, in addition to a promoter, terminator, and 2 inverted terminal repeats (ITRs), presents a significant barrier to AAV packaging. For example, the full length CFTR gene, including its promoter, terminator, and 2 inverted terminal repeats (ITRs), has been viewed as too big to fit into a single AAV vector, making gene delivery impossible. Efforts at gene therapy for CF have nonetheless been pursued for several decades, since identification and cloning of the CFTR gene. Initial efforts were aimed at fitting the expression cassette within a single AAV by eliminating the promoter entirely. Although these pioneering studies advanced to clinical trials, CFTR expression and functional rescue were not observed. More recent attempts at overcoming the limited payload capacity of AAV were focused on a combination of small synthetic promoters and a truncated CFTR gene.

[0004] Other large genes, such as the ATP7B gene which is mutated in Wilson's disease, the ATP7A gene which is mutated in Menkes disease, the AGL gene which is mutated in Cori Disease, the dystrophin gene which is mutated in Duchenne muscular dystrophy (DMD), and the CPS1 gene which is mutated in carbamoyl phosphate synthetase I deficiency (CPS1D), face similar barriers to AAV packaging.

[0005] Accordingly, there is a need in the art for compositions and methods for packaging large genes in vectors such as AAV, which are suitable for gene delivery.

### SUMMARY OF THE INVENTION

[0006] The invention is based, in part, upon the discovery that compact promoters can effectively drive expression of large genes useful in, for example, gene therapy applications. AAV represents a promising delivery vehicle for nucleic acids for gene therapy, but the small size of AAV is a barrier to delivery of large genes, such as those having coding sequences above about 4000 bp, and vector components. Here, the disclosure provides a solution to this problem using a compact promoter to deliver sufficient and sustained expression of genes, e.g., large genes such as CFTR, via AAV.

[0007] The invention is also based, in part, upon the discovery that CFTR sequences can be optimized based on an iterative RNA-folding and codon optimization process, generating sequences representing a range of thermodynamic stability. Such codon-optimized CFTR sequences enhance CFTR expression, processing, and function.

[0008] Accordingly, in one aspect, the disclosure relates to a nucleic acid including a compact promoter operably linked to a coding sequence of a gene, wherein the compact promoter is between 50 and 250 bp, and wherein the coding sequence of the gene is greater than about 4000 bp. In certain embodiments, the compact promoter is between 75 and 225 bp. In certain embodiments, the compact promoter is between 100 and 200 bp. In certain embodiments, the compact promoter is between 150 and 180 bp.

[0009] In certain embodiments, the promoter includes a nucleic acid sequence selected from SEQ ID NOs: 107-255 or the portion of any one of SEQ ID NOs: 25-106, 469-476, 559-564, 609-614, 673-678, 681, 692-697, 706-711, 719-724, 729-734, 748-753, 784-789, 904-909, 920-925, 936-1303, or the portion of any sequence in FIGS. 3-19 that corresponds to the H1 promoter (e.g., from about nucleotide 20 to about nucleotide 490 as numbered in FIG. 3), or a functional fragment thereof, or a variant having a nucleic acid sequence at least about 80%, at least about 85%, at least about 90%, at least about 95%, at least about 98%, at least about 99%, or at least about 99.5% identity thereto.

[0010] In certain embodiments, the compact promoter includes an H1 promoter. In certain embodiments, the H1 promoter is selected from the portion of any one of SEQ ID NOs: 25-106, 469-476, 559-564, 609-614, 673-678, 681, 692-697, 706-711, 719-724, 729-734, 748-753, 784-789, 904-909, 920-925, 936-1303, or the portion of any sequence in FIGS. 3-19 that corresponds to the H1 promoter (e.g., from about nucleotide 20 to about nucleotide 490 as numbered in FIG. 3) or a functional fragment thereof, or a variant having a nucleic acid sequence at least about 80%, at least about 85%, at least about 90%, at least about 95%, at least about 98%, at least about 99%, or at least about 99.5% identity thereto. In certain embodiments, the H1 promoter includes a human H1 promoter.

[0011] In certain embodiments, the compact promoter includes a Gar1 promoter. In certain embodiments, the Gar1 promoter is selected from SEQ ID NOs: 107-203 or a functional fragment thereof, or a variant having a nucleic acid sequence having at least about 80%, at least about 85%, at least about 90%, at least about 95%, at least about 98%, at least about 99%, or at least about 99.5% identity thereto. In certain embodiments, the Gar1 promoter is a human Gar1 promoter.

[0012] In certain embodiments, the compact promoter includes a bidirectional promoter selected from SEQ ID NOs: 204-255 or a functional fragment thereof, or a variant having a nucleic acid sequence at least about 80%, at least about 85%, at least about 90%, at least about 95%, at least about 98%, at least about 99%, or at least about 99.5% identity thereto.

[0013] In certain embodiments, the compact promoter does not comprise a viral promoter and/or a synthetic promoter. In certain embodiments, the compact promoter does not comprise F5tg83.

[0014] In certain embodiments, the compact promoter includes at least 95%, 98%, 99%, 99.5% or 100% identity to a naturally-occurring mammalian promoter.

[0015] In certain embodiments, compact promoter is capable of expressing a luciferase reporter at a higher level than is a HSK thymidine kinase (TK) promoter.

[0016] In certain embodiments, the coding sequence encodes a cystic fibrosis transmembrane conductance regulator (CFTR), ATP7B, ATP7A, AGL, DMD, CPS1, or a functional fragment or variant thereof.

[0017] In certain embodiments, the coding sequence encodes a cystic fibrosis transmembrane conductance regulator (CFTR). In certain embodiments, the CFTR coding sequence is codon optimized.

[0018] In certain embodiments, the codon-optimized CFTR coding sequence includes one or more of the following features as compared to a wild type CFTR coding sequence: (a) fewer unpaired base pairs of mRNA; (b) increased codon usage bias; (c) decreased GC content; (d) fewer CpG dinucleotides; (e) increased mRNA secondary structure; (f) fewer cryptic splicing sites; (g) fewer premature poly(A) sites; (h) fewer RNA instability motifs; (i) fewer AT-rich elements (ARE); (j) fewer repeat sequences (e.g., direct repeat, reverse repeat, and dyad repeat); (k) fewer GC peaks; and (l) fewer cis-acting elements.

[0019] In certain embodiments, the CFTR coding sequence includes a truncated form of a wild-type CFTR gene. In certain embodiments, the truncated form of the wild-type CFTR gene includes CTFRΔR.

[0020] In another aspect, the disclosure relates to an expression construct including a nucleic acid as described herein. In certain embodiments, the coding sequence can be expressed in the lung, pancreas, liver, neuron, or combinations thereof. In certain embodiments, the expression construct is expressed in HEK293, A549 cells, CFBE4lo−, A549, or Calu-3 cells.

[0021] In certain embodiments, the coding sequence encodes a CFTR, and, when the expression construct is expressed in an epithelial cell, the expressed CFTR protein causes an increase in transepithelial electrical resistance as compared to a cell in which the expression construct is not present. In certain embodiments, the coding sequence encodes a CFTR, and, when the expression construct is expressed in an epithelial cell, the expressed CFTR protein causes an increase in transepithelial Cl⁻ transport as compared to a cell in which the expression construct is not present.

[0022] In another aspect, the disclosure relates to a vector having an expression construct as described herein.

[0023] In certain embodiments, the vector includes an adeno-associated viral (AAV) vector. In certain embodiments, the AAV vector includes an AAV-6 vector.

[0024] In another aspect, the disclosure relates to a method of expressing a protein in a cell, the method including transfecting a cell with an expression construct as described herein or a vector as described herein.

[0025] In another aspect, the disclosure relates to a method of treating a disease (e.g., cystic fibrosis, Wilson disease, Menkes disease, Cori Disease, Duchenne Muscular Dystrophy, or carbamoyl phosphate synthetase I deficiency (CPS1D)) in a subject in need thereof, the method including administering to the subject a vector as described herein.

[0026] In another aspect, the disclosure relates to a nucleic acid having a cystic fibrosis transmembrane conductance regulator (CFTR) coding sequence, wherein the CFTR coding sequence is codon optimized, wherein the CFTR coding sequence includes one or more of the following features as compared to a wild type CFTR coding sequence: (a) fewer unpaired base pairs of mRNA; (b) increased codon usage bias; (c) decreased GC content; (d) fewer CpG dinucleotides; (e) increased mRNA secondary structure; (f) fewer cryptic splicing sites; (g) fewer premature poly(A) sites; (h) fewer RNA instability motifs; (i) fewer AT-rich elements (ARE); (j) fewer repeat sequences (e.g., direct repeat, reverse repeat, and dyad repeat); (k) fewer GC peaks; and (l) fewer cis-acting elements.

[0027] In certain embodiments, the codon usage bias is determined using the codon adaptive index (CAI). In certain embodiments, the CAI score is greater than about 0.70.

[0028] In certain embodiments, the frequency of optimal codons (FOP) is greater than about 80%.

[0029] In certain embodiments, the cis-acting element is selected from the group consisting of splice donors/acceptors (e.g., GGTAAG, GGTGAT, GTAAAA, GTAAGT), PolyA (e.g., AATAAA, ATTAAA, AAAAAAA), destabilizing motifs (e.g., ATTTA), AT-rich elements (e.g., ATTTTA, ATTTTTA, ATTTTTTA), PolyT, polymerase slippage sites (e.g., GGGGGG, CCCCCC), and internal Kozak sequences (e.g., ACCACCATGG, GCCACCATGG).

[0030] In certain embodiments, the nucleic acid further includes a 3′UTR, a 5′UTR or a 3′UTR and a 5′UTR. In certain embodiments, the minimum free energy structure of the nucleic acid having the 3′UTR, the 5′UTR or the 3′UTR and the 5′UTR does not favor base-pairing between (a) the 3′UTR, the 5′UTR or the 3′UTR and the 5′UTR and (b) the CFTR coding sequence.

[0031] In another aspect, the disclosure relates to an expression construct comprising a codon-optimized CFTR coding sequence as described herein. In certain embodiments, the half-life of the mRNA expressed from the codon optimized CFTR coding sequence is increased as compared to a wild-type CFTR coding sequence. In certain embodiments, expression of the codon optimized CFTR coding sequence results in an increased amount of CFTR mRNA or protein as compared to expression of a wild-type CFTR coding sequence. In certain embodiments, the CFTR coding sequence can be expressed in the lung and/or the pancreas. In certain embodiments, the expression construct can be expressed in HEK293 or A549 cells.

[0032] In certain embodiments, when the expression construct is expressed in an epithelial cell, the expressed CFTR protein causes an increase in transepithelial electrical resistance as compared to a cell in which the expression construct is not present. In certain embodiments, when the expression construct is expressed in an epithelial cell, the expressed CFTR protein causes an increase in transepithelial Cl⁻ transport as compared to a cell in which the expression construct is not present.

[0033] In another aspect, the disclosure relates to a vector having an expression construct including a codon-optimized CFTR coding sequence as described herein.

[0034] In certain embodiments, the vector includes an adeno-associated viral (AAV) vector. In certain embodiments, the AAV vector includes an AAV-6 vector.

[0035] In another aspect, the disclosure relates to a method of expressing a CFTR protein in a cell, the method including transfecting a cell with an expression construct or vector as described herein.

[0036] In another aspect, the disclosure relates to a method of treating cystic fibrosis in a subject in need thereof, the method including administering to the subject a vector as described herein.

[0037] In another aspect, the disclosure relates to a nucleic acid including a compact bidirectional promoter, a protein coding gene, and a second gene. In some embodiments, the compact bidirectional promoter has a size between 50 and 250 bp, has at least one regulatory element that provides for transcription of the protein coding gene in one direction and at least one regulatory element that provides for transcription of the second gene in the other direction, wherein the protein coding gene includes a coding sequence from about 300 bp to about 4110 bp. These and other aspects and features of the invention are described in the following detailed description and claims.

### DESCRIPTION OF THE DRAWINGS

[0038] The invention can be more completely understood with reference to the following drawings.

[0039] FIG. 1 is a schematic showing the region in which the H1 promoter is located, between the start of the H1RNA gene (left) to the start of the PARP-2 gene (right). Transcription factor binding sites including Staf, DSE, PSE, c-REL, GATA-1, GATA-2, and CREB are shown. In addition, the B recognition sequence (BRE) and TATA box are shown.

[0040] FIG. 2 provides Hidden Markov model (HMM) used to identify H1 promoter sequences.

[0041] FIG. 3 provides an alignment of Artiodactyla, Camivora, Cetacea, Chiroptera, Insectivore, Lagomorpha, Marsupial, Pangolin, Perissodactyla, Primate, Rodent, and Xenartha H1 promoters.

[0042] FIG. 4 provides an alignment of human and Orycteropus afer H1 promoters, showing the 132 bp insertion and 12 bp insertion found in the Orycteropus afer H1 promoter. The human H1 promoter corresponds to SEQ ID NO: 87 and the Orycteropus afer H1 promoter corresponds to SEQ ID NO: 25. The consensus sequence corresponds to SEQ ID NO: 1808.

[0043] FIG. 5 provides an alignment of H1 promoter sequences from Artioactyla species.

[0044] FIG. 6 provides an alignment of H1 promoter sequences from Carnivora species.

[0045] FIG. 7 provides an alignment of H1 promoter sequences from Cetacea species.

[0046] FIG. 8 provides an alignment of H1 promoter sequences from Chiroptera species.

[0047] FIG. 9 provides an alignment of H1 promoter sequences from Dermoptera species.

[0048] FIG. 10 provides an alignment of H1 promoter sequences from Hyracoidae species.

[0049] FIG. 11 provides an alignment of H1 promoter sequences from Insectivora species.

[0050] FIG. 12 provides an alignment of H1 promoter sequences from Lagomorpha species.

[0051] FIG. 13 provides an alignment of H1 promoter sequences from Marsupial species.

[0052] FIG. 14 provides an alignment of H1 promoter sequences from Pangolin species.

[0053] FIG. 15 provides an alignment of H1 promoter sequences from Perissodactyla species.

[0054] FIG. 16 provides an alignment of H1 promoter sequences from Primate species.

[0055] FIG. 17 provides an second alignment of H1 promoter sequences from Primate species showing the TATA box, PSE, Staf, and DSE binding sites.

[0056] FIG. 18 provides an alignment of H1 promoter sequences from Rodent species.

[0057] FIG. 19 provides an alignment of H1 promoter sequences from Xenartha species.

[0058] FIG. 20 depicts RT-qPCR design for CFTR coding sequence variants. By using a common 3′UTR region, priming and probe detection is consistent for all variants. RT priming with oligo(dT) may reduce problems with mRNA synthesis due to extensive secondary structure.

[0059] FIG. 21A depicts DNA alignment and conservation of the H1 bidirectional promoter, from the start of the H1RNA gene (left) to the start of the PARP-2 gene (right). FIG. 21B depicts RNA polymerase II-driven promoter activity in HeLa cells. Also depicted is the length of each promoter shown in the red bars, plotted against the right Y axis.

[0060] FIG. 22 depicts CFTR mRNA secondary structure. The secondary structure for the WT CFTR mRNA is shown (left with the calculated free energy shown below the structure. The secondary structure for a candidate optimized structure is shown (right) with the calculated free energy show below the structure. Extensive base-paring through the designed mRNA is seen. The calculated CAI for the structure on the right is greater than for the structure on the left.

[0061] FIG. 23 provides a schematic representation of mouse H1 promoter deletion constructs evaluated as described in Example 5.

[0062] FIG. 24 shows an alignment of mouse H1 promoter deletion constructs evaluated as described in Example 5.

[0063] FIG. 25 shows a bar graph showing normalized firefly to NANOLUC® luciferase signal for each mouse H1 promoter deletion constructs described in Example 5.

[0064] FIG. 26 provides a schematic representation of 17 mouse H1 promoter mutation constructs that were designed by walking across the promoter in 10 bp increments and replacing the sequence with its reverse complement.

[0065] FIG. 27 provides a sequence alignment of the mouse H1 promoter mutation constructs provided in FIG. 26.

[0066] FIG. 28 shows a bar graph showing normalized firefly to NANOLUC® luciferase signal for each mouse H1 promoter mutation constructs described in Example 6.

[0067] FIG. 29 provides a schematic representation of 12 constructs designed to incorporate introns into the mouse H1 promoter region.

[0068] FIG. 30 shows a bar graph showing normalized firefly to NANOLUC® luciferase signal for each mouse H1 intron constructs described in Example 7.

[0069] FIG. 31 provides a schematic showing the design of human H1 promoter and variant constructs. As shown in FIG. 31, a construct carrying a human H1 promoter alone (p144), a human H1 promoter with a 9 bp Kozak sequence (GCCGCCACC) (SEQ ID NO: 256) (p145), a human H1 promoter with a beta-globin 5′UTR (p146), and a human H1 promoter with a TATA box mutation (TATAA->TCGAA) (p147) were designed.

[0070] FIG. 32 provides a sequence alignment of the constructs provided in FIG. 31.

[0071] FIG. 33 shows a bar graph showing normalized firefly to NANOLUC® luciferase signal for each human H1 wt and 5′UTR construct described in Example 8.

[0072] FIG. 34 provides a schematic showing the design of mouse H1 promoter and 5′UTR variant constructs.

[0073] FIG. 35 provides a sequence alignment of the constructs provided in FIG. 34.

[0074] FIG. 36 shows a bar graph showing normalized firefly to NANOLUC® luciferase signal for each mouse H1 wt and 5′UTR construct described in Example 8.

[0075] FIG. 37 shows a bar graph showing normalized firefly to NANOLUC® luciferase signal for each bidirectional promoter construct described in Example 9. The promoters were human H1 (p144; SEQ ID NO: 87), mouse H1 (p148; SEQ ID NO: 93), human 7sk-1 (p199; SEQ ID NO: 242), mouse 7sk-1 (p203; SEQ ID NO: 204), human ALOXE3 (p204; SEQ ID NO: 246), human CGB1 (p206; SEQ ID NO: 247), human CGB2 (p207; SEQ ID NO: 248), human GAR1-1 (p216; SEQ ID NO: 107), human Med16-1 (p222; SEQ ID NO: 249), human Med16-2 (p223; SEQ ID NO: 250), human SRP (p242; SEQ ID NO: 233).

[0076] FIG. 38 is a graph showing the optimization of a luciferase reporter assay. HEK293 cells were co-transfected with firefly luciferase and NANOLUC® reporter plasmids under the control of standard promoters p006 (EF1a), p323 (PGK), and p322 (TK). Normalized luciferase expression (firefly:NANOLUC®) was quantified for transfection ratios of 90:10 ng, 99:1 ng, and 100:0.1 ng.

[0077] FIG. 39 is a bar graph showing normalized luciferase signal (firefly: NANOLUC®) for a library of H1 promoters including p095, p127, p110, p109, p088, p094, p060, p071, p077, p103, p10⁰, p102, p092, p073, p100, p102, p092, p073, p083, p130, p066, p089, p112, p101, p099, p116, p098, p069, p106, p131, p081, p107, p074, p072, p082, p097, p108, p065, p122, p114, p070, p091, p062, p119, p113, p063, p064, p090, p079, p105, p067, p128, p124, p084, p126, p078, p086, p093, p059, p058, p087, p061, p085, p129, p096, p111, p125, p115, p068, p118, p117, p076, p120, p123, and p104 in CFBE4lo− cells. Control TK promoter normalized luciferase activity is shown as “p322”.

[0078] FIG. 40 is a bar graph showing normalized luciferase signal (firefly: NANOLUC®) for a library of H1 promoters including p095, p127, p088, p094, p087, p110, p109, p083, p100, p073, p116, p092, p077, p066, p130, p101, p079, p071, p081, p119, p065, p098, p097, p060, p061, p089, p078, p070, p102, p084, p086, p059, p099, p106, p069, p125, p117, p058, p067, p129, p126, p107, p122, p064, p112, p062, p085, p091, p082, p072, p131, p090, p093, p063, p068, p114, p120, p115, p074, p076, p108, p113, p096, p124, p105, p103, p118, p128, p111, p123, and p104 in A549 cells. Control TK promoter normalized luciferase activity is shown as “p322”.

[0079] FIG. 41 is a bar graph showing normalized luciferase signal (firefly: NANOLUC®) for a library of H1 promoters including p095, p127, p094, p110, p107, p109, p102, p084, p071, p087, p101, p088, p097, p092, p066, p077, p106, p065, p099, p078, p116, p081, p119, p083, p098, p131, p073, p112, p100, p062, p103, p091, p061, p072, p129, p068, p114, p120, p060, p070, p118, p059, p113, p089, p108, p069, p067, p122, p124, p058, p079, p115, p093, p130, p086, p074, p125, p063, p126, p117, p090, p076, p096, p128, p105, p111, p123, p085, p082, p064, and p104 in Calu3 cells. Control TK promoter normalized luciferase activity is shown as “p322”.

[0080] FIG. 42A is a violin plot showing log-scale expression of a library of H1 promoters in three lung cell types (CFBE4lo−, A549, and Calu3). Vertical axis represents relative luminescence units.

[0081] FIG. 42B is a violin plot showing log-scale expression of a library of H1 promoters in Calu-3 cells compared to the expression activity of standard promoters TK, PGK, and EF1a.

[0082] FIG. 43 is a series of graphs showing linear regression analysis to compare the expression activity of each of the promoters in the library (each dot represents a promoter) in different cell types.

[0083] FIG. 44 is a plot showing hierarchical clustering of a library of H1 promoters segregated by activity in three lung cell types (CFBE4lo− marked with a *, A549 marked with a †, and Calu3 marked with a ‡) and one control cell type (HeLa marked with a ♦).

### DETAILED DESCRIPTION

[0084] Various features and aspects of the invention are discussed in more detail below.

[0085] The invention is based, in part, upon the discovery that compact promoters can effectively drive expression of large genes useful in, for example, gene therapy applications. AAV represents a promising delivery vehicle for nucleic acids for gene therapy, but the small size of AAV is a barrier to delivery of large genes, such as those having coding sequences above about 4000 bp, and vector components. Here, the disclosure provides a solution to this problem using a compact promoter to deliver sufficient and sustained expression of genes, e.g., large genes such as CFTR, via AAV.

[0086] The invention is also based, in part, upon the discovery that CFTR sequences can be optimized based on an iterative RNA-folding and codon optimization process, generating sequences representing a range of thermodynamic stability. Such codon-optimized CFTR sequences enhance CFTR expression, processing, and function.

[0087] Accordingly, the disclosure provides nucleic acids, expression constructs, and vectors comprising a compact promoter and a gene, e.g., a gene having more than about 4000 bp, wherein the compact promoter is small enough to allow for the inclusion of a large gene in a vector, such as an AAV vector, having a size limit that makes expression of large genes difficult using conventional promoters. Unless otherwise defined herein, scientific and technical terms used in this application shall have the meanings that are commonly understood by those of ordinary skill in the art.

[0088] Generally, nomenclature used in connection with, and techniques of, pharmacology, cell and tissue culture, molecular biology, cell and cancer biology, neurobiology, neurochemistry, virology, immunology, microbiology, genetics and protein and nucleic acid chemistry, described herein, are those well-known and commonly used in the art. In case of conflict, the present specification, including definitions, will control.

[0089] The practice of the present disclosure will employ, unless otherwise indicated, conventional techniques of molecular biology (including recombinant techniques), microbiology, cell biology, biochemistry and immunology, which are within the skill of the art. Such techniques are explained fully in the literature, such as, Molecular Cloning: A Laboratory Manual, second edition (Sambrook et al., 1989) Cold Spring Harbor Press; Oligonucleotide Synthesis (M. J. Gait, ed., 1984); Methods in Molecular Biology, Humana Press; Cell Biology: A Laboratory Notebook (J. E. Cellis, ed., 1998) Academic Press; Animal Cell Culture (R. I. Freshney, ed., 1987); Introduction to Cell and Tissue Culture (J. P. Mather and P. E. Roberts, 1998) Plenum Press; Cell and Tissue Culture: Laboratory Procedures (A. Doyle, J. B. Griffiths, and D. G. Newell, eds., 1993-1998) J. Wiley and Sons; Methods in Enzymology (Academic Press, Inc.); Gene Transfer Vectors for Mammalian Cells (J. M. Miller and M. P. Calos, eds., 1987); Current Protocols in Molecular Biology (F. M. Ausubel et al., eds., 1987); PCR: The Polymerase Chain Reaction, (Mullis et al., eds., 1994); Sambrook and Russell, Molecular Cloning: A Laboratory Manual, 3rd. ed., Cold Spring Harbor Laboratory Press, Cold Spring Harbor, N Y (2001); Ausubel et al., Current Protocols in Molecular Biology, John Wiley & Sons, N Y (2002); Harlow and Lane Using Antibodies: A Laboratory Manual, Cold Spring Harbor Laboratory Press, Cold Spring Harbor, N Y (1998); Coligan et al., Short Protocols in Protein Science, John Wiley & Sons, N Y (2003); Short Protocols in Molecular Biology (Wiley and Sons, 1999).

[0090] Enzymatic reactions and purification techniques are performed according to manufacturer's specifications, as commonly accomplished in the art or as described herein. The nomenclatures used in connection with, and the laboratory procedures and techniques of, analytical chemistry, biochemistry, immunology, molecular biology, synthetic organic chemistry, and medicinal and pharmaceutical chemistry described herein are those well-known and commonly used in the art. Standard techniques are used for chemical syntheses, and chemical analyses.

[0091] Throughout this specification and embodiments, the word “comprise,” or variations such as “comprises” or “comprising,” will be understood to imply the inclusion of a stated integer or group of integers but not the exclusion of any other integer or group of integers.

[0092] It is understood that wherever embodiments are described herein with the language “comprising,” otherwise analogous embodiments described in terms of “consisting of” and/or “consisting essentially of” are also provided.

[0093] The term “including” is used to mean “including but not limited to.” “Including” and “including but not limited to” are used interchangeably.

[0094] Any example(s) following the term “e.g.” or “for example” is not meant to be exhaustive or limiting.

[0095] Unless otherwise required by context, singular terms shall include pluralities and plural terms shall include the singular.

[0096] The articles “a” and “an” are used herein to refer to one or to more than one (i.e., to at least one) of the grammatical object of the article. By way of example, “an element” means one element or more than one element. Reference to “about” a value or parameter herein includes (and describes) embodiments that are directed to that value or parameter per se. For example, description referring to “about X” includes description of “X.” Numeric ranges are inclusive of the numbers defining the range.

[0097] Notwithstanding that the numerical ranges and parameters setting forth the broad scope of the disclosure are approximations, the numerical values set forth in the specific examples are reported as precisely as possible. Any numerical value, however, inherently contains certain errors necessarily resulting from the standard deviation found in their respective testing measurements. Moreover, all ranges disclosed herein are to be understood to encompass any and all subranges subsumed therein. For example, a stated range of “1 to 10” should be considered to include any and all subranges between (and inclusive of) the minimum value of 1 and the maximum value of 10; that is, all subranges beginning with a minimum value of 1 or more, e.g., 1 to 6.1, and ending with a maximum value of 10 or less, e.g., 5.5 to 10.

[0098] Where aspects or embodiments of the disclosure are described in terms of a Markush group or other grouping of alternatives, the present disclosure encompasses not only the entire group listed as a whole, but each member of the group individually and all possible subgroups of the main group, but also the main group absent one or more of the group members. The present disclosure also envisages the explicit exclusion of one or more of any of the group members in an embodiment of the disclosure.

[0099] Exemplary methods and materials are described herein, although methods and materials similar or equivalent to those described herein can also be used in the practice or testing of the present disclosure. The materials, methods, and examples are illustrative only and not intended to be limiting.

### I. Definitions

[0100] The following terms, unless otherwise indicated, shall be understood to have the following meanings:

[0101] As used herein, “residue” refers to a position in a protein and its associated amino acid identity.

[0102] As known in the art, “polynucleotide,” or “nucleic acid,” as used interchangeably herein, refer to chains of nucleotides of any length, and include DNA and RNA. The nucleotides can be deoxyribonucleotides, ribonucleotides, modified nucleotides or bases, and/or their analogs, or any substrate that can be incorporated into a chain by DNA or RNA polymerase. A polynucleotide may comprise modified nucleotides, such as methylated nucleotides and their analogs. If present, modification to the nucleotide structure may be imparted before or after assembly of the chain. The sequence of nucleotides may be interrupted by non-nucleotide components. A polynucleotide may be further modified after polymerization, such as by conjugation with a labeling component. Other types of modifications include, for example, “caps”, substitution of one or more of the naturally occurring nucleotides with an analog, internucleotide modifications such as, for example, those with uncharged linkages (e.g., methyl phosphonates, phosphotriesters, phosphoamidates, carbamates, etc.) and with charged linkages (e.g., phosphorothioates, phosphorodithioates, etc.), those containing pendant moieties, such as, for example, proteins (e.g., nucleases, toxins, antibodies, signal peptides, poly-L-lysine, etc.), those with intercalators (e.g., acridine, psoralen, etc.), those containing chelators (e.g., metals, radioactive metals, boron, oxidative metals, etc.), those containing alkylators, those with modified linkages (e.g., alpha anomeric nucleic acids, etc.), as well as unmodified forms of the polynucleotide(s). Further, any of the hydroxyl groups ordinarily present in the sugars may be replaced, for example, by phosphonate groups, phosphate groups, protected by standard protecting groups, or activated to prepare additional linkages to additional nucleotides, or may be conjugated to solid supports. The 5′ and 3′ terminal OH can be phosphorylated or substituted with amines or organic capping group moieties of from 1 to 20 carbon atoms. Other hydroxyls may also be derivatized to standard protecting groups. Polynucleotides can also contain analogous forms of ribose or deoxyribose sugars that are generally known in the art, including, for example, 2′-O-methyl-, 2′-O-allyl, 2′-fluoro- or 2′-azido-ribose, carbocyclic sugar analogs, alpha- or beta-anomeric sugars, epimeric sugars such as arabinose, xyloses or lyxoses, pyranose sugars, furanose sugars, sedoheptuloses, acyclic analogs and abasic nucleoside analogs such as methyl riboside. One or more phosphodiester linkages may be replaced by alternative linking groups. These alternative linking groups include, but are not limited to, embodiments wherein phosphate is replaced by P(O)S (“thioate”), P(S)S (“dithioate”), (O)NRi (“amidate”), P(O)R, P(O)OR′, CO or CH2 (“formacetal”), in which each R or R′ is independently H or substituted or unsubstituted alkyl (1-20 C) optionally containing an ether (—O—) linkage, aryl, alkenyl, cycloalkyl, cycloalkenyl or araldyl. Not all linkages in a polynucleotide need be identical. The preceding description applies to all polynucleotides referred to herein, including RNA and DNA.

[0103] IUPAC nucleotide code is used throughout. IUPAC nucleotide code is provided in TABLE 1.

TABLE 1

| | |
|---|---|
| A | Adenine |
| C | Cytosine |
| G | Guanine |
| T (or U) | Thymine (or Uracil) |
| R | A or G |
| Y | C or T |
| S | G or C |
| W | A or T |
| K | G or T |
| M | A or C |
| B | C or G or T |
| D | A or G or T |
| H | A or C or T |
| V | A or C or G |
| N | any base |
| . or - | gap |

[0104] The terms “polypeptide,” “oligopeptide,” “peptide” and “protein” are used interchangeably herein to refer to chains of amino acids of any length. The chain may be linear or branched, it may comprise modified amino acids, and/or may be interrupted by non-amino acids. The terms also encompass an amino acid chain that has been modified naturally or by intervention; for example, disulfide bond formation, glycosylation, lipidation, acetylation, phosphorylation, or any other manipulation or modification, such as conjugation with a labeling component. Also included within the definition are, for example, polypeptides containing one or more analogs of an amino acid (including, for example, unnatural amino acids, etc.), as well as other modifications known in the art. It is understood that the polypeptides can occur as single chains or associated chains.

[0105] As used herein, the term “functional fragment” refers to a fragment of (a) a promoter or (b) a gene or coding sequence (e.g., an mRNA) that encodes a protein that retains, for example, at least 10%, at least 20%, at least 30%, at least 40%, at least 50%, at least 60%, at least 70%, at least 80%, at least 90%, at least 95%, or 100% of at least one activity of the corresponding full-length, naturally occurring promoter or protein.

[0106] As used herein, the term “variant” refers to a variant of (a) a promoter or (b) a gene or coding sequence (e.g., an mRNA) that encodes a protein that retains, for example, at least 10%, at least 20%, at least 30%, at least 40%, at least 50%, at least 60%, at least 70%, at least 80%, at least 90%, at least 95%, or 100% of at least one activity of the corresponding full-length, naturally occurring promoter or protein. For example, a variant can comprise a splice variant or a gene comprising a mutation such as an insertion, deletion, or substitution.

[0107] “Homologous,” in all its grammatical forms and spelling variations, refers to the relationship between two proteins that possess a “common evolutionary origin,” including proteins from superfamilies in the same species of organism, as well as homologous proteins from different species of organism. Such proteins (and their encoding nucleic acids) have sequence homology, as reflected by their sequence similarity, whether in terms of percent identity or by the presence of specific residues or motifs and conserved positions.

[0108] However, in common usage and in the instant application, the term “homologous,” when modified with an adverb such as “highly,” may refer to sequence similarity and may or may not relate to a common evolutionary origin.

[0109] The term “sequence similarity,” in all its grammatical forms, refers to the degree of identity or correspondence between nucleic acid or amino acid sequences that may or may not share a common evolutionary origin.

[0110] “Percent (%) sequence identity” or “percent (%) identical to” with respect to a reference polypeptide (or nucleotide) sequence is defined as the percentage of amino acid residues (or nucleic acids) in a candidate sequence that are identical with the amino acid residues (or nucleic acids) in the reference polypeptide (nucleotide) sequence, after aligning the sequences and introducing gaps, if necessary, to achieve the maximum percent sequence identity, and not considering any conservative substitutions as part of the sequence identity. Alignment for purposes of determining percent amino acid sequence identity can be achieved in various ways that are within the skill in the art, for instance, using publicly available computer software such as BLAST, BLAST-2, ALIGN or Megalign (DNASTAR) software. Those skilled in the art can determine appropriate parameters for aligning sequences, including any algorithms needed to achieve maximal alignment over the full length of the sequences being compared.

[0111] As used herein, a “host cell” includes an individual cell or cell culture that can be or has been a recipient for vector(s) for incorporation of polynucleotide inserts. The term host cell may refer to the packaging cell line in which the rAAV is produced from the plasmid. In the alternative, the term “host cell” may refer to the target cell in which expression of the transgene is desired.

[0112] As used herein, a “vector,” refers to a recombinant plasmid or virus that comprises a nucleic acid to be delivered into a host cell, either in vitro or in vivo. A “recombinant viral vector” refers to a recombinant polynucleotide vector comprising one or more heterologous sequences (i.e. a nucleic acid sequence not of viral origin). In the case of recombinant AAV vectors, the recombinant nucleic acid is flanked by at least one inverted terminal repeat sequence (ITR). In some embodiments, the recombinant nucleic acid is flanked by two ITRs.

[0113] A “recombinant AAV vector (rAAV vector)” refers to a polynucleotide vector based on an adeno-associated virus comprising one or more heterologous sequences (i.e., nucleic acid sequence not of AAV origin) that are flanked by at least one AAV inverted terminal repeat sequence (ITR). Such rAAV vectors can be replicated and packaged into infectious viral particles when present in a host cell that has been infected with a suitable helper virus (or that is expressing suitable helper functions) and that is expressing AAV rep and cap gene products (i.e. AAV Rep and Cap proteins). When a rAAV vector is incorporated into a larger polynucleotide (e.g., in a chromosome or in another vector such as a plasmid used for cloning or transfection), then the rAAV vector may be referred to as a “pro-vector” which can be “rescued” by replication and encapsidation in the presence of AAV packaging functions and suitable helper functions. An rAAV vector can be in any of a number of forms, including, but not limited to, plasmids, linear artificial chromosomes, complexed with lipids, encapsulated within liposomes, and encapsidated in a viral particle, e.g., an AAV particle. An rAAV vector can be packaged into an AAV virus capsid to generate a “recombinant adeno-associated viral particle (rAAV particle)”.

[0114] An “rAAV virus” or “rAAV viral particle” refers to a viral particle composed of at least one AAV capsid protein and an encapsidated rAAV vector genome.

[0115] The term “transgene” refers to a polynucleotide that is introduced into a cell and is capable of being transcribed into RNA and optionally, translated and/or expressed under appropriate conditions. In aspects, it confers a desired property to a cell into which it was introduced, or otherwise leads to a desired therapeutic or diagnostic outcome. In another aspect, it may be transcribed into a molecule that mediates RNA interference, such as miRNA, siRNA, or shRNA.

[0116] The term “vector genome (vg)” as used herein may refer to one or more polynucleotides comprising a set of the polynucleotide sequences of a vector, e.g., a viral vector. A vector genome may be encapsidated in a viral particle. Depending on the particular viral vector, a vector genome may comprise single-stranded DNA, double-stranded DNA, or single-stranded RNA, or double-stranded RNA. A vector genome may include endogenous sequences associated with a particular viral vector and/or any heterologous sequences inserted into a particular viral vector through recombinant techniques. For example, a recombinant AAV vector genome may include at least one ITR sequence flanking a promoter, a stuffer, a sequence of interest (e.g., an RNAi), and a polyadenylation sequence. A complete vector genome may include a complete set of the polynucleotide sequences of a vector. In some embodiments, the nucleic acid titer of a viral vector may be measured in terms of vg/mL. Methods suitable for measuring this titer are known in the art (e.g., quantitative PCR).

[0117] An “inverted terminal repeat” or “ITR” sequence is a term well understood in the art and refers to relatively short sequences found at the termini of viral genomes which are in opposite orientation.

[0118] An “AAV inverted terminal repeat (ITR)” sequence, a term well-understood in the art, is an approximately 145-nucleotide sequence that is present at both termini of the native single-stranded AAV genome. The outermost 125 nucleotides of the ITR can be present in either of two alternative orientations, leading to heterogeneity between different AAV genomes and between the two ends of a single AAV genome. The outermost 125 nucleotides also contains several shorter regions of self-complementarity (designated A, A′, B, B′, C, C and D regions), allowing intrastrand base-pairing to occur within this portion of the ITR.

[0119] A “helper virus” for AAV refers to a virus that allows AAV (which is a defective parvovirus) to be replicated and packaged by a host cell. A number of such helper viruses are known in the art.

[0120] As used herein, “expression control sequence” means a nucleic acid sequence that directs transcription of a nucleic acid. An expression control sequence can be a promoter, such as a constitutive promoter, or an enhancer. The expression control sequence is operably linked to the nucleic acid sequence to be transcribed.

[0121] As used herein, “isolated molecule” (where the molecule is, for example, a polypeptide, a polynucleotide, or fragment thereof) is a molecule that by virtue of its origin or source of derivation (1) is not associated with one or more naturally associated components that accompany it in its native state, (2) is substantially free of one or more other molecules from the same species (3) is expressed by a cell from a different species, or (4) does not occur in nature.

[0122] As used herein, “purify,” and grammatical variations thereof, refers to the removal, whether completely or partially, of at least one impurity from a mixture containing the polypeptide and one or more impurities, which thereby improves the level of purity of the polypeptide in the composition (i.e., by decreasing the amount (ppm) of impurity(ies) in the composition).

[0123] As used herein, “substantially pure” refers to material which is at least 50% pure (i.e., free from contaminants), more preferably, at least 90% pure, more preferably, at least 95% pure, yet more preferably, at least 98% pure, and most preferably, at least 99% pure.

[0124] The terms “patient”, “subject”, or “individual” are used interchangeably herein and refer to either a human or a non-human animal. These terms include mammals, such as humans, non-human primates, laboratory animals, livestock animals (including bovines, porcines, camels, etc.), companion animals (e.g., canines, felines, other domesticated animals, etc.) and rodents (e.g., mice and rats). In some embodiments, the subject is a human that is at least 40, 45, 50, 55, 60, 65, 70, 75, 80, 85, 90 or 95 years of age.

[0125] As used herein, the terms “prevent,” “preventing” and “prevention” refer to the prevention of the recurrence or onset of, or a reduction in one or more symptoms of a disease or condition in a subject as result of the administration of a therapy (e.g., a prophylactic or therapeutic agent). For example, in the context of the administration of a therapy to a subject for an infection, “prevent,” “preventing” and “prevention” refer to the inhibition or a reduction in the development or onset of a disease or condition, or the prevention of the recurrence, onset, or development of one or more symptoms of a disease or condition, in a subject resulting from the administration of a therapy (e.g., a prophylactic or therapeutic agent), or the administration of a combination of therapies (e.g., a combination of prophylactic or therapeutic agents).

[0126] “Treating” a condition or patient refers to taking steps to obtain beneficial or desired results, including clinical results. With respect to a disease or condition, treatment refers to the reduction or amelioration of the progression, severity, and/or duration of one or more symptoms of the disease, or the amelioration of one or more symptoms resulting from the administration of one or more therapies (including, but not limited to, the administration of one or more prophylactic or therapeutic agents).

[0127] “Administering” or “administration of a substance, a compound or an agent to a subject can be carried out using one of a variety of methods known to those skilled in the art. In some embodiments, administration may be local. In other embodiments, administration may be systemic. Administering can also be performed, for example, once, a plurality of times, and/or over one or more extended periods. In some aspects, the administration includes both direct administration, including self-administration, and indirect administration, including the act of prescribing a drug. For example, as used herein, a physician who instructs a patient to self-administer a drug, or to have the drug administered by another and/or who provides a patient with a prescription for a drug is administering the drug to the patient.

[0128] Each embodiment described herein may be used individually or in combination with any other embodiment described herein.

### II. Compact Promoters

[0129] The disclosure is based, in part, upon the discovery that compact promoters can effectively drive expression of large genes useful in, for example, gene therapy applications such as those involving AAV. The size limitations of AAV make it difficult to use for the expression of large genes, such as those having coding sequences above about 4110 bp. However, this problem can be overcome by using a compact promoter, as described herein, to deliver sufficient and sustained expression of genes, e.g., large genes such as CFTR, via AAV.

[0130] A compact promoter provided herein can be selected to express the selected transgene in a desired target cell. In some embodiments, the target cell is a lung cell, a pancreatic cell, a liver cell, or a neuronal cell. The promoter may be derived from any species, including human. In one embodiment, the promoter is “cell specific.” The term “cell-specific” means that the particular promoter selected for the recombinant vector can direct expression of the selected transgene in a particular cell.

[0131] In certain embodiments, the promoter is of a small size, e.g., less than about 500 bp, due to the size limitations of the AAV vector. In certain embodiments, the promoter is less than about 300 bp, less than about 200 bp, between about 50 bp and about 400 bp, between about 75 bp and about 400 bp, between about 99 bp and about 400 bp, between about 100 bp and about 400 bp, between about 150 bp and about 400 bp, between about between about 200 bp and about 400 bp, between about 250 bp and about 400 bp, between about 300 bp and about 400 bp, about 50 bp and about 300 bp, about 75 bp and about 300 bp, about 100 bp and about 300 bp, about 150 bp and about 300 bp, between about 200 bp and about 300 bp, about 50 bp and about 250 bp, about 75 bp and about 250 bp, between about 100 bp and about 250 bp, between about 150 bp and about 250 bp, between about 200 bp and about 250 bp, between about 50 bp and about 200 bp, between about 75 bp and about 200 bp, between about 100 bp and about 200 bp, between about 150 bp and about 200 bp, between about 50 bp and about 150 bp, between about 100 bp and about 150 bp, between about 50 bp and about 150 bp, and between about 100 bp and about 150 bp in size.

[0132] In certain embodiments, the promoter is a bidirectional promoter. In certain embodiments, the bidirectional promoter is less than about 500 bp. In certain embodiments, the bidirectional promoter is less than about 300 bp, less than about 200 bp, between about 50 bp and about 400 bp, between about 75 bp and about 400 bp, between about 99 bp and about 400 bp, between about 100 bp and about 400 bp, between about 150 bp and about 400 bp, between about between about 200 bp and about 400 bp, between about 250 bp and about 400 bp, between about 300 bp and about 400 bp, between about 50 bp and about 300 bp, between about 75 bp and about 300 bp, between about 100 bp and about 300 bp, between about 150 bp and about 300 bp, between about 200 bp and about 300 bp, between about 50 bp and about 250 bp, between about 75 bp and about 250 bp, between about 100 bp and about 250 bp, between about 150 bp and about 250 bp, between about 200 bp and about 250 bp, between about 50 bp and about 200 bp, between about 75 bp and about 200 bp, between about 100 bp and about 200 bp, between about 150 bp and about 200 bp, between about 50 bp and about 150 bp, between about 100 bp and about 150 bp, between about 50 bp and about 150 bp, and between about 100 bp and about 150 bp in size.

[0133] In certain embodiments, the promoter comprises a nucleotide sequence having at least 85%, 90%, 95%, 96%, 97%, 98%, 99%, or 100% identity to any one of SEQ ID NO: 107-255 or the portion of any one of SEQ ID NOs: 25-106, 469-476, 559-564, 609-614, 673-678, 681, 692-697, 706-711, 719-724, 729-734, 748-753, 784-789, 904-909, 920-925, 936-1303, or the portion of any sequence in FIGS. 3-19 that corresponds to the H1 promoter (e.g., from about nucleotide 20 to about nucleotide 490 as numbered in FIG. 3) or a functional fragment or variant (e.g., codon optimized) thereof. In some embodiments, the promoter comprises the nucleotide sequence of any one of SEQ ID NO: 107-255 or the portion of any one of SEQ ID NOs: 25-106, 469-476, 559-564, 609-614, 673-678, 681, 692-697, 706-711, 719-724, 729-734, 748-753, 784-789, 904-909, 920-925, 936-1303, or the portion of any sequence in FIGS. 3-19 that corresponds to the H1 promoter (e.g., from about nucleotide 20 to about nucleotide 490 as numbered in FIG. 3) or a functional fragment or variant (e.g., codon optimized) thereof.

[0134] In certain embodiments, a functional fragment comprises a truncation of from about 10 to about 70 bases at the 5′ end, the 3′ end, or both the 5′ and 3′ ends of any one of SEQ ID NO: 107-255 or the portion of any one of SEQ ID NOs: 25-106, 469-476, 559-564, 609-614, 673-678, 681, 692-697, 706-711, 719-724, 729-734, 748-753, 784-789, 904-909, 920-925, 936-1303, or the portion of any sequence in FIGS. 3-19 that corresponds to the H1 promoter (e.g., from about nucleotide 20 to about nucleotide 490 as numbered in FIG. 3) or a variant thereof (e.g., a variant having at least 85%, 90%, 95%, 96%, 97%, 98%, 99%, or 100% identity to any one of SEQ ID NO: 107-255 or the portion of any one of SEQ ID NOs: 25-106, 469-476, 559-564, 609-614, 673-678, 681, 692-697, 706-711, 719-724, 729-734, 748-753, 784-789, 904-909, 920-925, 936-1303, or the portion of any sequence in FIGS. 3-19 that corresponds to the H1 promoter (e.g., from about nucleotide 20 to about nucleotide 490 as numbered in FIG. 3)). In certain embodiments, a functional fragment comprises a truncation of about 10 bases at the 5′ end, the 3′ end, or both the 5′ and 3′ ends of any one of SEQ ID NO: 107-255 or the portion of any one of SEQ ID NOs: 25-106, 469-476, 559-564, 609-614, 673-678, 681, 692-697, 706-711, 719-724, 729-734, 748-753, 784-789, 904-909, 920-925, 936-1303, or the portion of any sequence in FIGS. 3-19 that corresponds to the H1 promoter (e.g., from about nucleotide 20 to about nucleotide 490 as numbered in FIG. 3) or a variant thereof (e.g., a variant having at least 85%, 90%, 95%, 96%, 97%, 98%, 99%, or 100% identity to any one of SEQ ID NO: 107-255 or the portion of any one of SEQ ID NOs: 25-106, 469-476, 559-564, 609-614, 673-678, 681, 692-697, 706-711, 719-724, 729-734, 748-753, 784-789, 904-909, 920-925, 936-1303, or the portion of any sequence in FIGS. 3-19 that corresponds to the H1 promoter (e.g., from about nucleotide 20 to about nucleotide 490 as numbered in FIG. 3)). In certain embodiments, a functional fragment comprises a truncation of about 20 bases at the 5′ end, the 3′ end, or both the 5′ and 3′ ends of any one of SEQ ID NO: 107-255 or the portion of any one of SEQ ID NOs: 25-106, 469-476, 559-564, 609-614, 673-678, 681, 692-697, 706-711, 719-724, 729-734, 748-753, 784-789, 904-909, 920-925, 936-1303, or the portion of any sequence in FIGS. 3-19 that corresponds to the H1 promoter (e.g., from about nucleotide 20 to about nucleotide 490 as numbered in FIG. 3) or a variant thereof (e.g., a variant having at least 85%, 90%, 95%, 96%, 97%, 98%, 99%, or 100% identity to any one of SEQ ID NO: 107-255 or the portion of any one of SEQ ID NOs: 25-106, 469-476, 559-564, 609-614, 673-678, 681, 692-697, 706-711, 719-724, 729-734, 748-753, 784-789, 904-909, 920-925, 936-1303, or the portion of any sequence in FIGS. 3-19 that corresponds to the H1 promoter (e.g., from about nucleotide 20 to about nucleotide 490 as numbered in FIG. 3)). In certain embodiments, a functional fragment comprises a truncation of about 30 bases at the 5′ end, the 3′ end, or both the 5′ and 3′ ends of any one of SEQ ID NO: 107-255 or the portion of any one of SEQ ID NOs: 25-106, 469-476, 559-564, 609-614, 673-678, 681, 692-697, 706-711, 719-724, 729-734, 748-753, 784-789, 904-909, 920-925, 936-1303, or the portion of any sequence in FIGS. 3-19 that corresponds to the H1 promoter (e.g., from about nucleotide 20 to about nucleotide 490 as numbered in FIG. 3) or a variant thereof (e.g., a variant having at least 85%, 90%, 95%, 96%, 97%, 98%, 99%, or 100% identity to any one of SEQ ID NO: 107-255 or the portion of any one of SEQ ID NOs: 25-106, 469-476, 559-564, 609-614, 673-678, 681, 692-697, 706-711, 719-724, 729-734, 748-753, 784-789, 904-909, 920-925, 936-1303, or the portion of any sequence in FIGS. 3-19 that corresponds to the H1 promoter (e.g., from about nucleotide 20 to about nucleotide 490 as numbered in FIG. 3)). In certain embodiments, a functional fragment comprises a truncation of about 40 bases at the 5′ end, the 3′ end, or both the 5′ and 3′ ends of any one of SEQ ID NO: 107-255 or the portion of any one of SEQ ID NOs: 25-106, 469-476, 559-564, 609-614, 673-678, 681, 692-697, 706-711, 719-724, 729-734, 748-753, 784-789, 904-909, 920-925, 936-1303, or the portion of any sequence in FIGS. 3-19 that corresponds to the H1 promoter (e.g., from about nucleotide 20 to about nucleotide 490 as numbered in FIG. 3) or a variant thereof (e.g., a variant having at least 85%, 90%, 95%, 96%, 97%, 98%, 99%, or 100% identity to any one of SEQ ID NO: 107-255 or the portion of any one of SEQ ID NOs: 25-106, 469-476, 559-564, 609-614, 673-678, 681, 692-697, 706-711, 719-724, 729-734, 748-753, 784-789, 904-909, 920-925, 936-1303, or the portion of any sequence in FIGS. 3-19 that corresponds to the H1 promoter (e.g., from about nucleotide 20 to about nucleotide 490 as numbered in FIG. 3)). In certain embodiments, a functional fragment comprises a truncation of about 50 bases at the 5′ end, the 3′ end, or both the 5′ and 3′ ends of any one of SEQ ID NO: 107-255 or the portion of any one of SEQ ID NOs: 25-106, 469-476, 559-564, 609-614, 673-678, 681, 692-697, 706-711, 719-724, 729-734, 748-753, 784-789, 904-909, 920-925, 936-1303, or the portion of any sequence in FIGS. 3-19 that corresponds to the H1 promoter (e.g., from about nucleotide 20 to about nucleotide 490 as numbered in FIG. 3) or a variant thereof (e.g., a variant having at least 85%, 90%, 95%, 96%, 97%, 98%, 99%, or 100% identity to any one of SEQ ID NO: 107-255 or the portion of any one of SEQ ID NOs: 25-106, 469-476, 559-564, 609-614, 673-678, 681, 692-697, 706-711, 719-724, 729-734, 748-753, 784-789, 904-909, 920-925, 936-1303, or the portion of any sequence in FIGS. 3-19 that corresponds to the H1 promoter (e.g., from about nucleotide 20 to about nucleotide 490 as numbered in FIG. 3)). In certain embodiments, a functional fragment comprises a truncation of about 60 bases at the 5′ end, the 3′ end, or both the 5′ and 3′ ends of any one of SEQ ID NO: 107-255 or the portion of any one of SEQ ID NOs: 25-106, 469-476, 559-564, 609-614, 673-678, 681, 692-697, 706-711, 719-724, 729-734, 748-753, 784-789, 904-909, 920-925, 936-1303, or the portion of any sequence in FIGS. 3-19 that corresponds to the H1 promoter (e.g., from about nucleotide 20 to about nucleotide 490 as numbered in FIG. 3) or a variant thereof (e.g., a variant having at least 85%, 90%, 95%, 96%, 97%, 98%, 99%, or 100% identity to any one of SEQ ID NO: 107-255 or the portion of any one of SEQ ID NOs: 25-106, 469-476, 559-564, 609-614, 673-678, 681, 692-697, 706-711, 719-724, 729-734, 748-753, 784-789, 904-909, 920-925, 936-1303, or the portion of any sequence in FIGS. 3-19 that corresponds to the H1 promoter (e.g., from about nucleotide 20 to about nucleotide 490 as numbered in FIG. 3)). In certain embodiments, a functional fragment comprises a truncation of about 70 bases at the 5′ end, the 3′ end, or both the 5′ and 3′ ends of any one of SEQ ID NO: 107-255 or the portion of any one of SEQ ID NOs: 25-106, 469-476, 559-564, 609-614, 673-678, 681, 692-697, 706-711, 719-724, 729-734, 748-753, 784-789, 904-909, 920-925, 936-1303, or the portion of any sequence in FIGS. 3-19 that corresponds to the H1 promoter (e.g., from about nucleotide 20 to about nucleotide 490 as numbered in FIG. 3) or a variant thereof (e.g., a variant having at least 85%, 90%, 95%, 96%, 97%, 98%, 99%, or 100% identity to any one of SEQ ID NO: 107-255 or the portion of any one of SEQ ID NOs: 25-106, 469-476, 559-564, 609-614, 673-678, 681, 692-697, 706-711, 719-724, 729-734, 748-753, 784-789, 904-909, 920-925, 936-1303, or the portion of any sequence in FIGS. 3-19 that corresponds to the H1 promoter (e.g., from about nucleotide 20 to about nucleotide 490 as numbered in FIG. 3)).

[0135] In certain embodiments, the promoter includes a group of promoters that shares a biological parameter (e.g., level of activity or ability to express in a certain cell or tissue, such as a lung cell). In certain embodiments, the compact promoter has higher activity than standard promoters (e.g., higher activity than a TK promoter).

[0136] In certain embodiments, the promoter includes a nucleotide sequence having at least 85%, 90%, 95%, 96%, 97%, 98%, 99%, or 100% identity to p104 (SEQ ID NO: 84 or a functional fragment or variant (e.g., codon optimized) thereof. In some embodiments, a functional fragment includes a truncation of from about 10 to about 70 bases (e.g., about 10 bases, about 20 bases, about 30 bases, about 40 bases, about 50 bases, about 60 bases, or about 70 bases) at the 5′ end, the 3′ end, or both the 5′ and 3′ ends of p104 (SEQ ID NO: 84).

[0137] In certain embodiments, the promoter is selected from a group of promoters consisting of p111 (SEQ ID NO: 29), p123 (SEQ ID NO: 34), or p128 (SEQ ID NO: 70), and the promoter has a nucleotide sequence having at least 85%, 90%, 95%, 96%, 97%, 98%, 99%, or 100% identity to p111 (SEQ ID NO: 29), p123 (SEQ ID NO: 34), or p128 (SEQ ID NO: 70), or a functional fragment or variant (e.g., codon optimized) thereof. In some embodiments, a functional fragment includes a truncation of from about 10 to about 70 bases (e.g., about 10 bases, about 20 bases, about 30 bases, about 40 bases, about 50 bases, about 60 bases, or about 70 bases) at the 5′ end, the 3′ end, or both the 5′ and 3′ ends of p111 (SEQ ID NO: 29), p123 (SEQ ID NO: 34), or p128 (SEQ ID NO: 70).

[0138] In certain embodiments, the promoter is selected from a group of promoters consisting of p064 (SEQ ID NO: 64), p082 (SEQ ID NO: 104), or p085 (SEQ ID NO: 54), and the promoter has a nucleotide sequence having at least 85%, 90%, 95%, 96%, 97%, 98%, 99%, or 100% identity to p064 (SEQ ID NO: 64), p082 (SEQ ID NO: 104), or p085 (SEQ ID NO: 54), or a functional fragment or variant (e.g., codon optimized) thereof. In some embodiments, a functional fragment includes a truncation of from about 10 to about 70 bases (e.g., about 10 bases, about 20 bases, about 30 bases, about 40 bases, about 50 bases, about 60 bases, or about 70 bases) at the 5′ end, the 3′ end, or both the 5′ and 3′ ends of p064 (SEQ ID NO: 64), p082 (SEQ ID NO: 104), or p085 (SEQ ID NO: 54).

[0139] In certain embodiments, the promoter is selected from a group of promoters consisting of p058 (SEQ ID NO: 96), p059 (SEQ ID NO: 92), p061 (SEQ ID NO: 65), p067 (SEQ ID NO: 52), p068 (SEQ ID NO: 103), p069 (SEQ ID NO: 62), p074 (SEQ ID NO: 99), p076 (SEQ ID NO: 51), p086 (SEQ ID NO: 83), p089 (SEQ ID NO: 43), p090 (SEQ ID NO: 40), p093 (SEQ ID NO: 46), p096 (SEQ ID NO: 87), p105 (SEQ ID NO: 44), p108 (SEQ ID NO: 32), p113 (SEQ ID NO: 78), p114 (SEQ ID NO: 39), p115 (SEQ ID NO: 77), p117 (SEQ ID NO: 35), p118 (SEQ ID NO: 37), p120 (SEQ ID NO: 73), p122 (SEQ ID NO: 30), p124 (SEQ ID NO: 31), p125 (SEQ ID NO: 76), p126 (SEQ ID NO: 76), or p129 (SEQ ID NO: 71), and the promoter has a nucleotide sequence having at least 85%, 90%, 95%, 96%, 97%, 98%, 99%, or 100% identity to p058 (SEQ ID NO: 96), p059 (SEQ ID NO: 92), p061 (SEQ ID NO: 65), p067 (SEQ ID NO: 52), p068 (SEQ ID NO: 103), p069 (SEQ ID NO: 62), p074 (SEQ ID NO: 99), p076 (SEQ ID NO: 51), p086 (SEQ ID NO: 83), p089 (SEQ ID NO: 43), p090 (SEQ ID NO: 40), p093 (SEQ ID NO: 46), p096 (SEQ ID NO: 87), p105 (SEQ ID NO: 44), p108 (SEQ ID NO: 32), p113 (SEQ ID NO: 78), p114 (SEQ ID NO: 39), p115 (SEQ ID NO: 77), p117 (SEQ ID NO: 35), p118 (SEQ ID NO: 37), p120 (SEQ ID NO: 73), p122 (SEQ ID NO: 30), p124 (SEQ ID NO: 31), p125 (SEQ ID NO: 76), p126 (SEQ ID NO: 72), or p129 (SEQ ID NO: 71), or a functional fragment or variant (e.g., codon optimized) thereof. In some embodiments, a functional fragment includes a truncation of from about 10 to about 70 bases (e.g., about 10 bases, about 20 bases, about 30 bases, about 40 bases, about 50 bases, about 60 bases, or about 70 bases) at the 5′ end, the 3′ end, or both the 5′ and 3′ ends of p058 (SEQ ID NO: 96), p059 (SEQ ID NO: 92), p061 (SEQ ID NO: 65), p067 (SEQ ID NO: 52), p068 (SEQ ID NO: 103), p069 (SEQ ID NO: 62), p074 (SEQ ID NO: 99), p076 (SEQ ID NO: 51), p086 (SEQ ID NO: 83), p089 (SEQ ID NO: 43), p090 (SEQ ID NO: 40), p093 (SEQ ID NO: 46), p096 (SEQ ID NO: 87), p105 (SEQ ID NO: 44), p108 (SEQ ID NO: 32), p113 (SEQ ID NO: 78), p114 (SEQ ID NO: 39), p115 (SEQ ID NO: 77), p117 (SEQ ID NO: 35), p118 (SEQ ID NO: 37), p120 (SEQ ID NO: 73), p122 (SEQ ID NO: 30), p124 (SEQ ID NO: 31), p125 (SEQ ID NO: 76), p126 (SEQ ID NO: 76), or p129 (SEQ ID NO: 71).

[0140] In certain embodiments, the functional fragment comprise at least a transcription factor binding site. Identification of transcription factor binding sites can be determined by consensus, or by using a differential distance matrix or multidimensional scaling (De Bleser P. et al. (2007) Genome Biol 8(5):R83. In certain embodiments, a functional fragment comprises at least a transcription factor binding sites selected from Staf, DSE, PSE, c-REL, GATA-1, GATA-2, and CREB. A functional fragment can comprise the B recognition sequence (BRE) or TATA box.

[0141] In certain embodiments, the promoter comprises a TATA mutation. In certain embodiments, the TATA mutation is a TATAA→TCGAA mutation.

[0142] In certain embodiments, the promoter is not one or more of SEQ ID NO: 70-SEQ ID NO: 106 and SEQ ID NO: 241-SEQ ID NO: 255. In certain embodiments, the promoter is not one or more of SEQ ID NO: 70-SEQ ID NO: 106. In certain embodiments, the promoter is not one of SEQ ID NO: 241-SEQ ID NO: 255.

[0143] In certain embodiments, a nucleic acid comprising a promoter described herein further comprises a 5′UTR including at least a portion of a beta-globin 5′UTR sequence or a Kozak sequence. In certain embodiments, the 5′UTR includes the nucleotide sequence 5′-GCCGCCACC-3′ (SEQ ID NO: 256), or a 6 bp, a 7 bp, or an 8 bp fragment thereof. In certain embodiments, the 6 bp fragment is 5′-GCCACC-3′ (SEQ ID NO: 257).

[0144] In certain embodiments, a nucleic acid comprising a promoter described herein further comprises a terminator sequence. In certain embodiments, the terminator sequence comprises one of the terminator sequences in TABLE 2.

TABLE 2

| | |
|---|---|
| a synthetic poly(A) | AATAAAATATCTTTATTTTCATTACATCTGTGTGTTGGTTTTTT |
| sequence (SPA) | GTGTG (SEQ ID NO: 258) |
| SPA and Pause | AATAAAATATCTTTATTTTCATTACATCTGTGTGTTGGTTTTTT |
| | GTGTGAATCGATAGTACTAACATACGCTCTCCATCAAAACAA |
| | AACGAAACAAAACAAACTAGCAAAATAGGCTGTCCCCAGTG |
| | CAAGTGCAGGTGCCAGAACATTTCTCT (SEQ ID NO: 259); |
| SV40 (240 bp) | ATCTAGATAACTGATCATAATCAGCCATACCACATTTGTAGA |
| | GGTTTTACTTGCTTTAAAAAACCTCCCACACCTCCCCCTGAAC |
| | CTGAAACATAAAATGAATGCAATTGTTGTTGTTAACTTGTTTA |
| | TTGCAGCTTATAATGGTTACAAATAAAGCAATAGCATCACAA |
| | ATTTCACAAATAAAGCATTTTTTTCACTGCATTCTAGTTGTGG |
| | TTTGTCCAAACTCATCAATGTATCTTA (SEQ ID NO: 260) |
| SV 40-mini | TTGTTTATTGCAGCTTATAATGGTTACAAATAAAGCAATAGC |
| (120 bp) | ATCACAAATTTCACAAATAAAGCATTTTTTTCACTGCATTCTA |
| | GTTGTGGTTTGTCCAAACTCATCAATGTATCTTAT (SEQ ID |
| | NO: 261) |
| bGH poly A | CGACTGTGCCTTCTAGTTGCCAGCCATCTGTTGTTTGCCCCTC |
| | CCCCGTGCCTTCCTTGACCCTGGAAGGTGCCACTCCCACTGTC |
| | CTTTCCTAATAAAATGAGGAAATTGCATCGCATTGTCTGAGT |
| | AGGTGTCATTCTATTCTGGGGGGTGGGGTGGGGCAGGACAGC |
| | AAGGGGGAGGATTGGGAAGACAATAGCAGGCATGCTGGGGA |
| | TGCGGTGGGCTCTATGG (SEQ ID NO: 262) |
| TKpoly A | GGGGGAGGCTAACTGAAACACGGAAGGAGACAATACCGGAA |
| | GGAACCCGCGCTATGACGGCAATAAAAAGACAGAATAAAAC |
| | GCACGGGTGTTGGGTCGTTTGTTCATAAACGCGGGGTTCGGT |
| | CCCAGGGCTGGCACTCTGTCGATACCCCACCGAGACCCCATT |
| | GGGGCCAATACGCCCGCGTTTCTTCCTTTTCCCCACCCCACCC |
| | CCCAAGTTCGGGTGAAGGCCCAGGGCTCGCAGCCAACGTCG |
| | GGGCGGCAGGCCCTGCCATAG (SEQ ID NO: 263) |
| SNRP1 | GGTATCAAATAAAATACGAAATGTGACAGATT (SEQ ID NO: |
| | 264) |
| SNRP1a | AAATAAAATACGAAATGTGACAGATT (SEQ ID NO: 265) |
| Histone H4B | GGTTGCTGATTTCTCCACAGCTTGCATTTCTGAACCAAAGGCC |
| | CTTTTCAGGGCCGCCCAACTAAACAAAAGAAGAGCTGTATCC |
| | ATTAAGTCAAGAAGC (SEQ ID NO: 266) |
| MALAT-1 | GATTCGTCAGTAGGGTTGTAAAGGTTTTTCTTTTCCTGAGAAA |
| | ACAACCTTTTGTTTTCTCAGGTTTTGCTTTTTGGCCTTTCCCTA |
| | GCTTTAAAAAAAAAAAAGCAAAAGACGCTGGTGGCTGGCAC |
| | TCCTGGTTTCCAGGACGGGGTTCAAGTCCCTGCGGTGTCTTTG |
| | CTT (SEQ ID NO: 267) |
| MALAT-comp14 | AAAGGTTTTTCTTTTCCTGAGAAATTTCTCAGGTTTTGCTTTTT |
| | AAAAAAAAAGCAAAAGACGCTGGTGGCTGGCACTCCTGGTT |
| | TCCAGGACGGGGTTCAAGTCCCTGCGGTGTCTTTGCTT (SEQ |
| | ID NO: 268) |

[0145] In certain embodiments, the compact promoter is coupled with a viral intron (e.g., an SV40i intron, a MVM intron, a Mv2 intron, an HNRNPH1 intron, chimeric introns or synthetic introns).

[0146] In certain embodiments, the compact promoter does not comprise a viral promoter and/or a synthetic promoter. In certain embodiments, the compact promoter does not comprise F5tg83.

[0147] In certain embodiments, the compact promoter comprises at least 95%, 98%, 99%, 99.5% or 100% identity to a naturally-occurring mammalian promoter. In certain embodiments, the compact promoter comprises at least 95%, 98%, 99%, 99.5% or 100% identity to a naturally-occurring human promoter.

[0148] The expression level of a compact promoter can be determined by expressing a reporter molecule in a cell, e.g., a human embryonic kidney (HEK) cell line or an N2A cell line. In certain embodiments, the compact promoter is capable of expressing a luciferase reporter at a higher level than is a HSK thymidine kinase (TK) promoter.

### H1 Promoters

[0149] In certain embodiments, the promoter is comprises an H1 promoter. The H1 promoter is a bidirectional promoter having both pol II and pol III activity. The disclosure provides previously unidentified H1 promoters that Applicant identified by generating a Hidden Markov model (HMM) profile from a multispecies alignment of known H1 promoters (see, e.g., International Patent Publication No. WO2015/195621 and WO2018/009534). Regions flanking the H1 promoter region that were conserved throughout mammals were identified. As shown in FIG. 1, the region comprising the H1 promoter is located between the RPPH1 (H1 RNA) gene located on the minus strand to the left, and the beginning (i.e., the ATG(GCG)) of the protein coding gene, PARP2, located to the right. The RPPH1 gene comprises a highly conserved region in the H1 RNA gene (5′-GGAAGCTCA-3′) that is conserved throughout all mammals. Accordingly, in certain embodiments, the H1 promoter comprises or consists of a region between the ATG(GCG) of PARP2, and the highly conserved region in the H1 RNA gene (5′-GGAAGCTCA-3′). Also shown in FIG. 1 is the position of the pol III portion of the H1 promoter. Additional conserved regions present in the H1 promoter are shown, including, for example, conserved transcription factor binding sites, like a TATA box.

[0150] A Hidden Markov model (HMM) profile for identifying H1 promoters is provided in FIG. 2.

[0151] An alignment of naturally-occurring H1 promoters and consensus sequences is provided in FIG. 3 (wherein sequences numbered 1-498 in FIG. 3 correspond to SEQ ID NOs: 1304-1803 and consensus/100%, consensus/90%, consensus/80% and consensus/70% correspond to SEQ ID NOs: 1804-1807, respectively). Nucleotides 1-19 (as numbered in the alignment) form part of the H1 RNA gene and nucleotides 491 and above (as numbered in the alignment) form part of the PARP2 gene. Accordingly, nucleotides 20-490 correspond to the H1 promoter as used herein. Thus, in certain embodiments, the H1 promoter comprises nucleotides 20-490, as numbered in the alignment (or corresponding to the numbering in the alignment of FIG. 3 for a given H1 promoter sequence not present in the alignment of FIG. 3) of any one of SEQ ID NOs: 25-106 or a sequence provided in FIGS. 3-19. In addition, nucleotides 19-280, as numbered in the alignment (or corresponding to the numbering in the alignment of FIG. 3 for a given H1 promoter sequence not present in the alignment of FIG. 3)) of any one of SEQ ID NOs: 25-106 or a sequence provided in FIGS. 3-19 correspond with the pol III portion of the H1 promoter. An alignment of human and Orycteropus afer (Aardvark) H1 promoter sequences provided in FIG. 4 shows a 132 bp and a 12 bp insertion found in the Orycteropus afer H1 promoter sequence. Without wishing to be bound by theory, it is noted that the 144 bp insertion corresponds closely to the length of DNA required to wrap around a nucleosome (147 bp). Therefore, given the context of DNA found in eukaryotic cells, binding site distances are maintained and conserved.

[0152] In certain embodiments, the promoter is selected from a promoter in TABLE 3.

TABLE 3

| Promoter | Promoter | SEQ |
|---|---|---|
| Designation | Name | ID NO: |
| p095 | Marmoset H1 Bidirectional Promoter | 91 |
| p127 | Big brown bat H1 Bidirectional Promoter | 27 |
| p094 | Microbat H1 Bidirectional Promoter | 49 |
| p071 | Synthetic-2 H1 Bidirectional Promoter | 63 |
| p110 | Elephant H1 Bidirectional Promoter | 80 |
| p101 | Opossum H1 Bidirectional Promoter | 50 |
| p109 | David's myotis H1 Bidirectional Promoter | 38 |
| p116 | Bushbaby H1 Bidirectional Promoter | 74 |
| p066 | Star-nosed mole H1 Bidirectional Promoter | 61 |
| p060 | Tree Shrew H1 Bidirectional Promoter | 66 |
| p099 | Guinea pig H1 Bidirectional Promoter | 85 |
| p131 | Aardvark H1 Bidirectional Promoter | 25 |
| p100 | Goat H1 Bidirectional Promoter | 41 |
| p098 | Ferret H1 Bidirectional Promoter | 82 |
| p097 | Horse H1 Bidirectional Promoter | 86 |
| p092 | Killer whale H1 Bidirectional Promoter | 45 |
| p073 | Shrew H1 Bidirectional Promoter | 56 |
| p112 | Chinese tree shrew H1 Bidirectional Promoter | 36 |
| p081 | Sooty mangabey H1 Bidirectional Promoter | 59 |
| p078 | Shrew mouse H1 Bidirectional Promoter | 57 |
| p079 | Sheep H1 Bidirectional Promoter | 102 |
| p077 | Sifaka H1 Bidirectional Promoter | 58 |
| p065 | White-faced sapajou H1 Bidirectional Promoter | 69 |
| p130 | Angolan colobus H1 Bidirectional Promoter | 26 |
| p084 | Rat H1 Bidirectional Promoter | 100 |
| p106 | Cape golden mole H1 Bidirectional Promoter | 33 |
| p088 | Orangutan H1 Bidirectional Promoter | 95 |
| p091 | Mas night monkey H1 Bidirectional Promoter | 48 |
| p103 | Manatee H1 Bidirectional Promoter | 47 |
| p102 | Large flying fox H1 Bidirectional Promoter | 89 |
| p087 | Golden hamster H1 Bidirectional Promoter | 42 |
| p083 | Squirrel monkey H1 Bidirectional Promoter | 60 |
| p063 | Weddell seal H1 Bidirectional Promoter | 67 |
| p064 | Tenrec H1 Bidirectional Promoter | 64 |
| p072 | Pig H1 Bidirectional Promoter | 97 |
| p070 | Ryukyu mouse H1 Bidirectional Promoter | 55 |
| p119 | Cat H1 Bidirectional Promoter | 75 |
| p082 | Tarsier H1 Bidirectional Promoter | 104 |
| p059 | Mouse H1 Bidirectional Promoter | 92 |
| p058 | Panda H1 Bidirectional Promoter | 96 |
| p085 | Rhesus H1 Bidirectional Promoter | 54 |
| p062 | White rhinoceros H1 Bidirectional Promoter | 68 |
| p067 | Pig-tailed macaque H1 Bidirectional Promoter | 52 |
| p107 | Black flying-fox H1 Bidirectional Promoter | 28 |
| p061 | Tibetan antelope H1 Bidirectional Promoter | 65 |
| p086 | Gorilla H1 Bidirectional Promoter | 83 |
| p105 | Hedgehog H1 Bidirectional Promoter | 44 |
| p089 | Golden snub-nosed monkey H1 Bidirectional | 43 |
| | Promoter | |
| p096 | Human H1 Bidirectional Promoter | 87 |
| p090 | Gibbon H1 Bidirectional Promoter | 40 |
| p076 | Pacific walrus H1 Bidirectional Promoter | 51 |
| p113 | Crab-eating macaque H1 Bidirectional Promoter | 78 |
| p069 | Synthetic-1 H1 Bidirectional Promoter | 62 |
| p068 | Squirrel H1 Bidirectional Promoter | 103 |
| p093 | Lesser Egyptian jerboa H1 Bidirectional Promoter | 46 |
| p074 | Rabbit H1 Bidirectional Promoter | 99 |
| p125 | Chimp H1 Bidirectional Promoter | 76 |
| p124 | Brush-tailed rat H1 Bidirectional Promoter | 31 |
| p117 | Chinese hamster H1 Bidirectional Promoter | 35 |
| p114 | Drill H1 Bidirectional Promoter | 39 |
| p108 | Camel H1 Bidirectional Promoter | 32 |
| p118 | Consensus-1 H1 Bidirectional Promoter | 37 |
| p126 | Baboon H1 Bidirectional Promoter | 72 |
| p129 | Armadillo H1 Bidirectional Promoter | 71 |
| p111 | Black snub-nosed monkey H1 Bidirectional | 29 |
| | Promoter | |
| p122 | Bonobo H1 Bidirectional Promoter | 30 |
| p120 | Bottlenose dolphin H1 Bidirectional Promoter | 73 |
| p128 | Alpaca H1 Bidirectional Promoter | 70 |
| p104 | Green monkey H1 Bidirectional Promoter | 84 |
| p123 | Chinchilla H1 Bidirectional Promoter | 34 |
| p115 | Cow H1 Bidirectional Promoter | 77 |

[0153] In certain embodiments, the H1 promoter is a mammalian promoter, e.g., an artiodactyla H1 promoter, a camnivora H1 promoter, a cetacea H1 promoter, a chiroptera H1 promoter, an insectivora H1 promoter, a lagomorpha H1 promoter, a marsupial H1 promoter, a pangolin H1 promoter, a penissodactyla H1 promoter, a primate H1 promoter, a rodent H1 promoter, or a xenartha promoter. In certain embodiments, the H1 promoter is an ancestral promoter (e.g., selected from SEQ ID NOs: 936-1303). In some embodiments, the promoter comprises a nucleotide sequence having at least 85%, 90%, 95%, 96%, 97%, 98%, 99%, or 100% identity to the portion of any one of SEQ ID NOs: 25-106, 469-476, 559-564, 609-614, 673-678, 681, 692-697, 706-711, 719-724, 729-734, 748-753, 784-789, 904-909, 920-925, 936-1303, or the portion of any sequence in FIGS. 3-19 that corresponds to the H1 promoter (e.g., from about nucleotide 20 to about nucleotide 490 as numbered in FIG. 3), or a functional fragment or variant (e.g., codon optimized) thereof. In some embodiments, the promoter comprises the portion of any one of SEQ ID NOs: 25-106, 469-476, 559-564, 609-614, 673-678, 681, 692-697, 706-711, 719-724, 729-734, 748-753, 784-789, 904-909, 920-925, 936-1303, or the portion of any sequence in FIGS. 3-19 that corresponds to the H1 promoter (e.g., from about nucleotide 20 to about nucleotide 490 as numbered in FIG. 3), or a functional fragment or variant (e.g., codon optimized) thereof.

[0154] In certain embodiments, the promoter is not one or more of SEQ ID NO: 70-SEQ ID NO: 106.

[0155] In certain embodiments, a functional fragment comprises a truncation of from about 10 bases to about 40 bases at the 5′ end, the 3′ end, or both the 5′ and 3′ ends of any one of SEQ ID NOs: 25-106 or a sequence provided in FIGS. 3-19, or a variant thereof (e.g., a variant having at least 85%, 90%, 95%, 96%, 97%, 98%, 99%, or 100% identity to any one of SEQ ID NOs: 25-106 or a sequence provided in FIGS. 3-19). In certain embodiments, a functional fragment comprises a truncation of about 15 bases at the 5′ end, the 3′ end, or both the 5′ and 3′ ends of any one of SEQ ID NOs: 25-106 or a sequence provided in FIGS. 3-19 or a variant thereof (e.g., a variant having at least 85%, 90%, 95%, 96%, 97%, 98%, 99%, or 100% identity to any one of SEQ ID NOs: 25-106 or a sequence provided in FIGS. 3-19). In certain embodiments, a functional fragment comprises a truncation of about 20 bases at the 5′ end, the 3′ end, or both the 5′ and 3′ ends of any one of SEQ ID NOs: 25-106 or a sequence provided in FIGS. 3-19 or a variant thereof (e.g., a variant having at least 85%, 90%, 95%, 96%, 97%, 98%, 99%, or 100% identity to any one of SEQ ID NOs: 25-106 or a sequence provided in FIGS. 3-19). In certain embodiments, a functional fragment comprises a truncation of about 25 bases at the 5′ end, the 3′ end, or both the 5′ and 3′ ends of any one of SEQ ID NOs: 25-106 or a sequence provided in FIGS. 3-19 or a variant thereof (e.g., a variant having at least 85%, 90%, 95%, 96%, 97%, 98%, 99%, or 100% identity to any one of SEQ ID NOs: 25-106 or a sequence provided in FIGS. 3-19). In certain embodiments, a functional fragment comprises a truncation of about 30 bases at the 5′ end, the 3′ end, or both the 5′ and 3′ ends of any one of SEQ ID NOs: 25-106 or a sequence provided in FIGS. 3-19 or a variant thereof (e.g., a variant having at least 85%, 90%, 95%, 96%, 97%, 98%, 99%, or 100% identity to any one of SEQ ID NOs: 25-106 or a sequence provided in FIGS. 3-19). In certain embodiments, a functional fragment comprises a truncation of about 35 bases at the 5′ end, the 3′ end, or both the 5′ and 3′ ends of any one of SEQ ID NOs: 25-106 or a sequence provided in FIGS. 3-19 or a variant thereof (e.g., a variant having at least 85%, 90%, 95%, 96%, 97%, 98%, 99%, or 100% identity to any one of any one of SEQ ID NOs: 25-106 or a sequence provided in FIGS. 3-19). In certain embodiments, a functional fragment comprises a truncation of about 40 bases at the 5′ end, the 3′ end, or both the 5′ and 3′ ends of any one of SEQ ID NOs: 25-106 or a sequence provided in FIGS. 3-19 or a variant thereof (e.g., a variant having at least 85%, 90%, 95%, 96%, 97%, 98%, 99%, or 100% identity to any one of SEQ ID NOs: 25-106 or a sequence provided in FIGS. 3-19).

[0156] In certain embodiments, the functional fragment comprise at least a transcription factor binding site. Identification of transcription factor binding sites can be determined by consensus, or by using a differential distance matrix or multidimensional scaling (De Bleser P. et al. (2007) Genome Biol 8(5):R83.

[0157] In certain embodiments, the promoter comprises a TATA mutation. In certain embodiments, the TATA mutation is a TATAA→TCGAA mutation.

[0158] In certain embodiments, a nucleic acid comprising a promoter described herein further comprises a 5′UTR including at least a portion of a beta-globin 5′UTR sequence or a Kozak sequence. In certain embodiments, the 5′UTR includes the nucleotide sequence 5′-GCCGCCACC-3′ (SEQ ID NO: 256), or a 6 bp, a 7 bp, or an 8 bp fragment thereof. In certain embodiments, the 6 bp fragment is 5′-GCCACC-3′ (SEQ ID NO: 257).

[0159] In certain embodiments, a nucleic acid comprising a promoter described herein further comprises a terminator sequence. In certain embodiments, the terminator sequence comprises one of the terminator sequences in TABLE 4.

TABLE 4

| | |
|---|---|
| a synthetic poly(A) | AATAAAATATCTTTATTTTCATTACATCTGTGTGTTGGTTTTTT |
| sequence (SPA) | GTGTG (SEQ ID NO: 258) |
| SPA and Pause | AATAAAATATCTTTATTTTCATTACATCTGTGTGTTGGTTTTTT |
| | GTGTGAATCGATAGTACTAACATACGCTCTCCATCAAAACAA |
| | AACGAAACAAAACAAACTAGCAAAATAGGCTGTCCCCAGTG |
| | CAAGTGCAGGTGCCAGAACATTTCTCT (SEQ ID NO: 259); |
| SV40 (240 bp) | ATCTAGATAACTGATCATAATCAGCCATACCACATTTGTAGA |
| | GGTTTTACTTGCTTTAAAAAACCTCCCACACCTCCCCCTGAAC |
| | CTGAAACATAAAATGAATGCAATTGTTGTTGTTAACTTGTTTA |
| | TTGCAGCTTATAATGGTTACAAATAAAGCAATAGCATCACAA |
| | ATTTCACAAATAAAGCATTTTTTTCACTGCATTCTAGTTGTGG |
| | TTTGTCCAAACTCATCAATGTATCTTA (SEQ ID NO: 260) |
| SV 40-mini | TTGTTTATTGCAGCTTATAATGGTTACAAATAAAGCAATAGC |
| (120 bp) | ATCACAAATTTCACAAATAAAGCATTTTTTTCACTGCATTCTA |
| | GTTGTGGTTTGTCCAAACTCATCAATGTATCTTAT (SEQ ID |
| | NO: 261) |
| bGH poly A | CGACTGTGCCTTCTAGTTGCCAGCCATCTGTTGTTTGCCCCTC |
| | CCCCGTGCCTTCCTTGACCCTGGAAGGTGCCACTCCCACTGTC |
| | CTTTCCTAATAAAATGAGGAAATTGCATCGCATTGTCTGAGT |
| | AGGTGTCATTCTATTCTGGGGGGTGGGGTGGGGCAGGACAGC |
| | AAGGGGGAGGATTGGGAAGACAATAGCAGGCATGCTGGGGA |
| | TGCGGTGGGCTCTATGG (SEQ ID NO: 262) |
| TKpoly A | GGGGGAGGCTAACTGAAACACGGAAGGAGACAATACCGGAA |
| | GGAACCCGCGCTATGACGGCAATAAAAAGACAGAATAAAAC |
| | GCACGGGTGTTGGGTCGTTTGTTCATAAACGCGGGGTTCGGT |
| | CCCAGGGCTGGCACTCTGTCGATACCCCACCGAGACCCCATT |
| | GGGGCCAATACGCCCGCGTTTCTTCCTTTTCCCCACCCCACCC |
| | CCCAAGTTCGGGTGAAGGCCCAGGGCTCGCAGCCAACGTCG |
| | GGGCGGCAGGCCCTGCCATAG (SEQ ID NO: 263) |
| SNRP1 | GGTATCAAATAAAATACGAAATGTGACAGATT (SEQ ID NO: |
| | 264) |
| SNRP1a | AAATAAAATACGAAATGTGACAGATT (SEQ ID NO: 265) |
| Histone H4B | GGTTGCTGATTTCTCCACAGCTTGCATTTCTGAACCAAAGGCC |
| | CTTTTCAGGGCCGCCCAACTAAACAAAAGAAGAGCTGTATCC |
| | ATTAAGTCAAGAAGC (SEQ ID NO: 266) |
| MALAT-1 | GATTCGTCAGTAGGGTTGTAAAGGTTTTTCTTTTCCTGAGAAA |
| | ACAACCTTTTGTTTTCTCAGGTTTTGCTTTTTGGCCTTTCCCTA |
| | GCTTTAAAAAAAAAAAAGCAAAAGACGCTGGTGGCTGGCAC |
| | TCCTGGTTTCCAGGACGGGGTTCAAGTCCCTGCGGTGTCTTTG |
| | CTT (SEQ ID NO: 267) |
| MALAT-comp14 | AAAGGTTTTTCTTTTCCTGAGAAATTTCTCAGGTTTTGCTTTTT |
| | AAAAAAAAAGCAAAAGACGCTGGTGGCTGGCACTCCTGGTT |
| | TCCAGGACGGGGTTCAAGTCCCTGCGGTGTCTTTGCTT (SEQ |
| | ID NO: 268) |

[0160] In certain embodiments, the compact promoter is coupled with a viral intron (e.g., an SV40i intron, a MVM intron, a Mv2 intron, an HNRNPH1 intron, chimeric introns or synthetic introns.).

[0161] In certain embodiments, the compact promoter does not comprise a viral promoter and/or a synthetic promoter. In certain embodiments, the compact promoter does not comprise F5tg83.

[0162] In certain embodiments, the compact promoter comprises at least 95%, 98%, 99%, 99.5% or 100% identity to a naturally-occurring mammalian promoter. In certain embodiments, the compact promoter comprises at least 95%, 98%, 99%, 99.5% or 100% identity to a naturally-occurring human promoter.

[0163] The expression level of a compact promoter can be determined by expressing a reporter molecule in a cell, e.g., a human embryonic kidney (HEK) cell line or an N2A cell line. In certain embodiments, the compact promoter is capable of expressing a luciferase reporter at a higher level than is a HSK thymidine kinase (TK) promoter.

### Artiodactyla H1 Promoters

[0164] In certain embodiments, the promoter comprises an Artiodactyla H1 promoter. An alignment of Artiodactyla H1 promoter sequences is provided in FIG. 5 (wherein sequences numbered 1-200 in FIG. 5 correspond to SEQ ID NOs: 269-468 and consensus/100%, consensus/90%, consensus/80% and consensus/70% correspond to SEQ ID NOs 1811-1814, respectively). In some embodiments, the promoter comprises a nucleotide sequence having at least 85%, 90%, 95%, 96%, 97%, 98%, 99%, or 100% identity to nucleotides 20-266 of any one of the sequences in FIG. 5 or a functional fragment or variant (e.g., codon optimized) thereof.

In certain embodiments, the Artiodactyla H1 promoter comprises a sequence selected from the sequences in TABLE 5:

TABLE 5

| | |
|---|---|
| Artiodactyl | TGAGCTTCCCKCCGCCCTAYGSMRAAMAMYRSSCKCAARSMGCATTTATAA |
| Alignment | KGMKCYCAWACCTARAGMCAYTTKWCGGTTAYGGTGACTTCCCAYAASACA |
| consensus | TTGCGACATGCAAATAYTDYRGWGCGTYCCKCCCCTGGYARYTCCWCGCTR |
| sequence | GGACGCACRCGCRCTACGNGTTCCCGCCTTTWGACTGCGCYGGCGATTCCW |
| 75%_Identity | GGGAGMGGRYTGATGACGTCAGCGTTCGGGMTCCATGGCG (SEQ ID |
| | NO: 469) |
| Artiodactyl | TGAGCTTCCCKCCGCCCTAYGBMRRAVRVYDSSYKCARDSMRCAYTTATAA |
| Alignment | DGHKCYCADAMSTARAKMSAYTTBWCRSTTAYGGTGACTTCYCRYAASACA |
| consensus | TTGSGAYATGCAAATAYTDYRGWGCGTYNNNCCKCSCCTGGNYARYTYYWC |
| sequence | GCYRGGACGCACRCGCRCTRCGNGYTCCCGCCTTTWGACTGCGCYGGCGAT |
| 85%_Identity | WCYWGGGAGMGGRYTGATGACGTCARYGTTSKGGMTCCATGGCG (SEQ |
| | ID NO: 470) |
| Artiodactyl | TGAGCTTCCCKCCGCCCYAYRBVRRANRVYDVVYKCWRDBMRCRYTTATAA |
| Alignment | NRHKCYCADAMSTARAKHSAYTTBWYRSTTAYGGTGACTTCYCRYAASACA |
| consensus | KTGSGRYATGCAAATAYTDYRGHGYGYHNNNCCBCSYCYGGNNNNNYARYT |
| sequence | YYDCKCYRGGACGYRCRCGCRMTRCRNGYTCCCGCCTWKWGACTGCGCYGG |
| 90%_Identity | CGATWCYWRSGAGMKGRYTGATGACGTCARYGTTSKGGMTCCATGGCG |
| | (SEQ ID NO: 471) |
| Artiodactyl | TGAGCTTCYCKCCGCCCYAYRNNRRRNRNBDVVBBCWVNBMRYVYTTATAA |
| Alignment | NRHKCBCADAVBKARRKHVAYTTBWYRVTTAYGGYGAYTTCYCNRHAMSRC |
| consensus | AKWGSRRYATGCAAATAYKDYRGHNNNNNNGYRYHNNNCCBSBYCYRKNNN |
| sequence | NNNYADBTYYDCKNCYRGGACGYRSRCGCRMTRCRNGYTCCCGCCYWKWGA |
| 95%_Identity | CTGCGCYSGCNGATWMYHRNGARVKGRYTGATGACGTCRRYRTTVKGGHTC |
| | CATGGCG (SEQ ID NO: 472) |
| Artiodactyl | TGAGCTTCYCDCCGCCCYRYVNNVRNNNNBNNNNNBDVNNHRYVYTTATAA |
| Alignment | NRNDCBSRNRNBBNVRKNNAYNNNHHRVTTAYGGYGAYTYCYCNRHAMSVM |
| consensus | ABWGSRRBATGYAAATAYBNYRGHNNNNNNRBRYHNNNCCBSBYCHDDNNN |
| sequence | NNNHMDBKYYDHNNNNNGKACRYRNRCRYVVBNYRNSYTCCSGCCYWKDNN |
| 99%_Identity | GAYBGHRCHVGYNGRYWMYNRNGARVKRVYTGATGACGYMRVYRHKVNGRH |
| | WCCATGGCG (SEQ ID NO: 473) |
| Artiodactyl | TGAGCTYCYCDCCGCCYYRHNNNNNNNNNNNNNNNBNNNNNNVNNNRYNNT |
| Alignment | WATAWNRNDCBSRNVNNBNVRBNNAYNNNHHVNYTAYGGYGAYTYCYCNRH |
| consensus | AMSVVABWGSRNRBATGYAAATNNBNHRNHNNNNNNRBRBHNNNCSNNBYY |
| sequence | NDDNNNNNNNMDBBYBNNNNNNNRDRCVBRNRMRYVNNNHRNVHYCCSRCC |
| 100%_Identity | YHKDNNNGVYBBHNSNNSYNGRBDMYNRNGADVNNRVYYRRTGACRYMRVY |
| | DHBNNRRHDCBATGGCG (SEQ ID NO: 474) |

[0165] In some embodiments, the promoter comprises a nucleotide sequence having at least 85%, 90%, 95%, 96%, 97%, 98%, 99%, or 100% identity to nucleotides 20-238 of any one of SEQ ID NOs: 469-474 or a functional fragment or variant (e.g., codon optimized) thereof.

### Carnivora H1 Promoters

[0166] In certain embodiments, the promoter comprises a Carnivora H1 promoter. An alignment of Carnivora H1 promoter sequences is provided in FIG. 6 (wherein sequences numbered 1-86 in FIG. 6 correspond to SEQ ID NOs: 475-558 and SEQ ID NOs: 1809-1810, and consensus/100%, consensus/90%, consensus/80% and consensus/70% correspond to SEQ ID NOs: 1815-1818, respectively). In some embodiments, the promoter comprises a nucleotide sequence having at least 85%, 90%, 95%, 96%, 97%, 98%, 99%, or 100% identity to nucleotides 20 to 253 any one of the sequences in FIG. 6 or a functional fragment or variant (e.g., codon optimized) thereof.

[0167] In certain embodiments, the Carnivora H1 promoter comprises a sequence selected from those in TABLE 6.

TABLE 6

| | |
|---|---|
| Carnivora | TGAGCTTCCCTCCGCCCTATGGGGAAAGGGTGGMCCCRSMGAGCATTTATA |
| Alignment | AGGCTCCCRYAYCTAAAGRCATTTYWCAGTTATGGTGACTTCCCACAAAYR |
| consensus | CRYAGCAACATGCAAATATCGHGGRGWGTACCKCCCCTGTCCYWTGYASRC |
| sequence | GTCTTTCTCWSSASGCACGCACGCGCGCTGTGTTCCCCGCCYTGTGACTCY |
| 75%_Identity | AGGCGGGYRWTTCCWGGGRSRGGKTTGMTGACRKSMAMGTTCWGGCTYCAT |
| | GGCG (SEQ ID NO: 559) |
| Carnivora | TGAGCTTCCCTCCGCCCTATGGGGAAAVGGYGGHYCYRVMGAGSATTTATA |
| Alignment | AGRCTCCCRYAYCTAAAKRCATTTHWCAGTTATGGTGACTTCCCACAAAYR |
| consensus | CRYAGCAACATGCAAATATCGHGGRGWGTACCKCCCCTGTCCYWTGYASRY |
| sequence | GTCTTTCTCWSSASGCACGCACGCGCGCTGTRTTCCCCGCCYTGTGACTCY |
| 85%_Identity | AGGCGGGYRWTTCCHGGGRSRGGBTTGMTGACRKSMAMGTTCWGGCTYCAT |
| | GGCG (SEQ ID NO: 560) |
| Carnivora | TGAGCTTCCCTCCGCCCTAYGGGGAAAVRGYGGHYCYRVVGMGSAYTTATA |
| Alignment | AGRCTCCCDYAYCTAAAKRCATTTHWCAGTTATGGTGAYTTCCCACAAAYR |
| consensus | CRYAGCAACATGCAAATATMGHRGRGWGTACCKCCCCTGTCCYWTGYASRY |
| sequence | GKCTTTCTCWSSASGCACGCACGCGCKCTGTRTTCCCCGCCYTGTGACTCY |
| 90%_Identity | AGGYGGGYRWTTCYHGGGRSRGGBTTGMTGACRDSMAMGTTCWGRCTYCAT |
| | GGCG (SEQ ID NO: 561) |
| Carnivora | TGAGCTTCCCTCCGCCCTAYGRRRVRAVRGHVRNYCYRVVGMGVAYTTATA |
| Alignment | ARRCYCCMDYAHCTAAAKRCATTTHWCARTYAYGGTGAYTTCCCACAAAYR |
| consensus | CRYAGCAACATGCAAATWTMGHRRRGWGTACCKCCCCTGTCCYWTGYASRY |
| sequence | GKCTWTCTMDBSRSGCACGCACGCGCKCTGTRTTCCCCGCCYTRTGACTCY |
| 95%_Identity | ARGHGGRYRDTTCYHGGRRSRGKBTTGMTGACRDSMAMGTTCHGRCTYCAT |
| | GGCG (SEQ ID NO: 562) |
| Carnivora | TGAGCTTCCCTCCGCCCKAYGRVRVRAVDVNNNNNBBRVNVMVNRYTTATA |
| Alignment | ARRCYYYHNYRHSTRAWBVCATTWNWCRRTYRYGGTGAYTTCCCDCAAANR |
| consensus | CRYMGCAAYATGYAAAYWYMKHRRRGHGHRYYDCCYCDRTCBYWHVYMVRH |
| sequence | RBCTNTYTHNNSRNGCACGCACGCRSDCTRYRTTCCCCGCCYTRTGACTCN |
| 99%_Identity | RRSHRGRYDDTDCYHRGVRSRVKBTTGVYGMCRNSVRVBTYCHGRYKYCAT |
| | GGCG (SEQ ID NO: 563) |
| Carnivora | TGAGCTTCCCTCCGCCCKAYGRVRVRAVDVNNNNNBBRVNVMVNRYTTATA |
| Alignment | ARRCYYYHNYRHSTRAWBVCATTWNWCRRTYRYGGTGAYTTCCCDCAAANR |
| consensus | CRYMGCAAYATGYAAAYWYMKHRRRGHGHRYYDCCYCDRTCBYWHVYMVRH |
| sequence | RBCTNTYTHNNSRNGCACGCACGCRSDCTRYRTTCCCCGCCYTRTGACTCN |
| 100%_Identity | RRSHRGRYDDTDCYHRGVRSRVKBTTGVYGMCRNSVRVBTYCHGRYKYCAT |
| | GGCG (SEQ ID NO: 564) |

[0168] In some embodiments, the promoter comprises a nucleotide sequence having at least 85%, 90%, 95%, 96%, 97%, 98%, 99%, or 1000% identity to nucleotides 20-253 of any one of SEQ ID NOs: 559-564 or a functional fragment or variant (e.g., codon optimized) thereof.

### Cetacea H1 Promoters

[0169] In certain embodiments, the promoter comprises a Cetacea H1 promoter. An alignment of Cetacea H1 promoter sequences is provided in FIG. 7 (wherein sequences numbered 1-44 in FIG. 7 correspond to SEQ ID NOs: 565-608, and consensus/100%, consensus/90%, consensus/80% and consensus/70% correspond to SEQ ID NOs: 1819-1822, respectively). In some embodiments, the promoter comprises a nucleotide sequence having at least 85%, 90%, 95%, 96%, 97%, 98%, 99%, or 100% identity to nucleotides 20-241 of any one of the sequences in FIG. 7 or a functional fragment or variant (e.g., codon optimized) thereof.

[0170] In certain embodiments, the Cetacea H1 promoter comprises a sequence selected from those in TABLE 7.

TABLE 7

| | |
|---|---|
| Cetacea | TGAGCTTCCCKCCGCCCTAYGCCGAAARYYWRGCTCAASCCRCATTTATAA |
| Alignment | GGCTCCCAAAYCTAARKACATTTGTCGGTTATGGTGACTTCCCGCAACACA |
| consensus | TTGCGACATGCAAATACTGCGGAGCGTWCCTCCCCTGGCAACTCCTCGCTG |
| sequence | GGACGCACGCGCGCTACGTGCTCCCGCCTTTTGACTGCGCCGGCGATACTT |
| 75%_Identity | GGGAGAGGGTTGATGACGTCAGCGTTCTGGCTCCATGGC (SEQ ID NO: |
| | 609) |
| Cetacea | TGAGCTTCCCKCCGCCCTAYRCYGAAARNYWRSYTCAASSYRCATTTATAA |
| Alignment | RGCTCSCAAAYCKAARKACATTTGTCGGTTATGGTGACTTCCCGCAMCACA |
| consensus | TTGCGACATGCAAATACTGCGGAGYGYHCCTCCCCTGGCAACTCCTCGCTG |
| sequence | GGACGCACGCGCRCTRCGTGCTCCCGCCTTTTGACTGCGCCGGCGATACTT |
| 85%_Identity | GGGAGAGGGTTGATGACGTCAGCGTTCTGGCTCCATGGC (SEQ ID NO: |
| | 610) |
| Cetacea | TGAGCTTCCCDCCGCCCTAYRMYRAAARNYDRSYKCAAVSYRCATTTATAA |
| Alignment | RGCTCSCAARBCKAARKACATTTGTMGGTTATGGTGACTTCCCGCAMCACA |
| consensus | TTGCGACATGCAAATACTGCGGAGYGYHCCTCCCCTGGCAACTCCTCGCTG |
| sequence | GGACGCACGCGCRCTRCGTGCTCCCGCCTTTTGACTGCGCCGGCGATACTT |
| 90%_Identity | GGGAGAGGGTTGATGACGTCAGCGTTCTGGCTCCATGGC (SEQ ID NO: |
| | 611) |
| Cetacea | TGAGCTTCCCDCCGCCCTAYRHBRAAARNBDVVYKYVVVBYRYMNTTATAA |
| Alignment | RGCTCBCAARBCKAARKRCATTTSWMGSTTATGGTGACTTCCCGYAMCACA |
| consensus | TTGCGACATGCAAATACTGCGGAGYGYHCCTCCCCWGGCAACTCCTCGCTG |
| sequence | GGACGCAMGCGCRCTRCGTGCTCCCGCCTTTKGACTGMGCCGGCGAYACYT |
| 95%_Identity | GGGAGAGRGTTGATGACGTCAGCGTTCTGGCTCCATGGC (SEQ ID NO: |
| | 612) |
| Cetacea | TGAGCTTCYCDCCGCCCTRYDNBVRARVNBNNNBKYVVNNNRYVNTTATAA |
| Alignment | RGCTCBCAMVBCKAARKRYATTTSHMVNTTATGGTGACTTCCCGYAMCRCA |
| consensus | TTGCGACATGCAAATNNTGMGGAGYGYHNNNCCYCYYCWRRMAACTCCTMG |
| sequence | CYGGGACGCAMGCGYRYTDCRTSMTCCCGCCTYTKGRCYGMRCSSGCGRYR |
| 99%_Identity | CYTGGGAKARRGTTGATGACRYCASCRTTCTGGCTCCATGGC (SEQ ID |
| | NO: 613) |
| Cetacea | TGAGCTTCYCDCCGCCCTRYDNBVRARVNBNNNBKYVVNNNRYVNTTATAA |
| Alignment | RGCTCBCAMVBCKAARKRYATTTSHMVNTTATGGTGACTTCCCGYAMCRCA |
| consensus | TTGCGACATGCAAATNNTGMGGAGYGYHNNNCCYCYYCWRRMAACTCCTMG |
| sequence | CYGGGACGCAMGCGYRYTDCRTSMTCCCGCCTYTKGRCYGMRCSSGCGRYR |
| 100%_Identity | CYTGGGAKARRGTTGATGACRYCASCRTTCTGGCTCCATGGC (SEQ ID |
| | NO: 614) |

[0171] In some embodiments, the promoter comprises a nucleotide sequence having at least 85%, 90%, 95%, 96%, 97%, 98%, 99%, or 100% identity to nucleotides 20-238 ofany one of SEQ ID NOs: 609-614 or a functional fragment or variant (e.g., codon optimized) thereof.

### Chiroptera H1 Promoters

[0172] In certain embodiments, the promoter comprises a Chiroptera H1 promoter. An alignment of Chiroptera H1 promoter sequences is provided in FIG. 8 (wherein sequences numbered 1-57 in FIG. 8 correspond to SEQ ID NOs: 615-671, and consensus/100Y, consensus/90%, consensus/80% and consensus/70% correspond to SEQ ID NOs: 1823-1826, respectively). In some embodiments, the promoter comprises a nucleotide sequence having at least 85%, 90%, 95%, 96%, 97%, 98%, 99%, or 100% identity to nucleotides 20-276 of any one of the sequences in FIG. 8 or a functional fragment or variant (e.g., codon optimized) thereof.

[0173] In certain embodiments, the Chiroptera H1 promoter comprises a sequence selected from those in TABLE 8.

TABLE 8

| | |
|---|---|
| Chiroptera | TGAGCTTCCCTCCGCCCTNBGRGRRRRRVVBBYYWSNYGSMRRMTATATAA |
| Alignment | GGNYCCCWYWYCTVWAGRCMTTTYAMGRTTASGGTGAYTTCCCACAAYACA |
| consensus | TAGCGACATGCAAATRWNGHNGGGYGTGCCTYCMCKGTCCYTNGYSGRCRD |
| sequence | CKTCTYKCYVGKAMGNNNNNNCGCGCTGMGTRTTCCCGCCTTKTGACNNYA |
| 75%_Identity | RVYKRGCGARTCCKGGGAGRGGRYWGWTGACGTCAACAKTCVGGCTCCATG |
| | GCG (SEQ ID NO: 673) |
| Chiroptera | TGAGCTTCCCTCCGCCCTNBRVGDRRRDVVNNNBBBBDBNBGSVRRHTATA |
| Alignment | TRAGRNNCCYDYWYSKVWAGRCMTTTYWHRRKTASGGTGAYTTCCCACAAY |
| consensus | RCATAGCGACATGYAAATDHNNHNRGGYRTGCYTYCHCKGKCCYYNGYNRR |
| sequence | MRNCDYCTYKNYNNNNMGNNNNNNSGNNCTGHGHRTTCCCGCCTTBTGRCN |
| 85%_Identity | NYRRVYBRGCGARTNCDGGGARRRGRYWGDTKAYGTCRNNNNNNNNNACWK |
| | TYVSGCTCSATGGCG (SEQ ID NO: 674) |
| Chiroptera | TGAGCTTCNCTCCGCCCTNBRVRDRRRDNNNNNNBBBDBNBVVVRRHTATA |
| Alignment | TRAGRNNCCYDBHYSKVDRGDYMTTTHWHRRKKABGGTGAYTTCCCACAAY |
| consensus | RCAHAGCGACATGYAAATDHNNNNRGRYRTGYYTYCHCBGKCCYYNGYNRD |
| sequence | MNNYDYNNNKNNNNNNMNNNNNNNSNNNSYGNBHDWTCCCGCCTTBNGRNN |
| 90%_Identity | NYRNVBBRGCGARTNCDGGGARVRRRYDGDTKAYGTVRNNNNNNNNNRYWB |
| | WBVSGCWYSATGGCG (SEQ ID NO: 675) |
| Chiroptera | TGAGCTTCNCTCCGCCCTNBRVRDRRDNNNNNNNNNNNBNNVVVVRNTATA |
| Alignment | TRAGRNNCCHDNNHBKVDDRDHMTTTHNHRVDKABRGYRAYTTCCCAYAAY |
| consensus | RCMHRGCRAYATGYAAATDNNNNNRRDBDYGYYKBYNBNSNYYYBNNNNNN |
| sequence | HNNNNNNNNNNNNNNNNNNNNNNNNNNNSNNNBHDNTCCCGCCTYNNNNNN |
| 95%_Identity | NNNNVBNDRCRARTNCNRGGARVRRRNDGNTKAYGYVRNNNNNNNNNRYWB |
| | HBNBGCDYNATGGCG (SEQ ID NO: 676) |
| Chiroptera | TGAGCTTCNCKCCGCCCYNNRVVNVVNNNNNNNNNNNNNNNVNNVVNTWWA |
| Alignment | KVWRVNNNBYHNNNNBDNNNDNHMYYTHNNVVNKABDGYRAYNTTCCCAYR |
| consensus | RBRCHHVGCRAYAYGYAAAWDNNNNNNDDBDYSYBNBYNNNNNBNNBNNNN |
| sequence | NNNNNNNNNNNNNNNNNNNNNNNNNNNNNNNNNNNNNNNNNTYYYGBYHNN |
| 99%_Identity | NNNNNNNNNNNNNNDRNDRVKNYNRGGRRVRVNNNNNNGNTBWYGHNNVNN |
| | NNNNNNNVYDNNNNNNNNYNATGGCG (SEQ ID NO: 677 |
| Chiroptera | NVVNKABDGYRAYNTTCCCAYRRBRCHHVGCRAYAYGYAAAWDNNNNNNDD |
| Alignment | BDYSYBNBYNNNNNBNNBNNNNNNNNNNNNNNNNNNNNNNNNNNNNNNNNN |
| consensus | NNNNNNNNNNNNTYYYGBYHNNNNNNNNNNNNNNNNDRNDRVKNYNRGGRR |
| sequence | VRVNNNNNNGNTBWYGHNNVNNNNNNNNNVYDNNNNNNNNYNATGGCG |
| 100%_Identity | (SEQ ID NO: 678) |

[0174] In some embodiments, the promoter comprises a nucleotide sequence having at least 85%, 90%, 95%, 96%, 97%, 98%, 99%, or 100% identity to nucleotides 20-253 of any one of SEQ ID NOs: 673-678 or a functional fragment or variant (e.g., codon optimized) thereof.

### Dermoptera H1 Promoters

[0175] In certain embodiments, the promoter comprises a Dermoptera H1 promoter. An alignment of Dermoptera H1 promoter sequences is provided in FIG. 9 (wherein sequences numbered 1-2 in FIG. 9 correspond to SEQ ID NOs: 679 and 680, and consensus/100%, consensus/90%, consensus/80% and consensus/70% correspond to SEQ ID NOs: 1827-1830, respectively). In some embodiments, the promoter comprises a nucleotide sequence having at least 85%, 90%, 95%, 96%, 97%, 98%, 99%, or 100% identity to nucleotides 20-227 of any one of the sequences in FIG. 9 or a functional fragment or variant (e.g., codon optimized) thereof.

In certain embodiments, the Dermoptera H1 promoter comprises

TGAGCTTCCCTCCGCCCTACCCCCCAAGTGGSCCACAGGCGGTATTTATAAGGCTTACAGCC
CTAAAGACATTTACCATTATGGTGACTTCCCATAATACATAGCGACATGCAAAATTGAGGGG
CGTGCCAGACGGGCGTCGTCTCTCCGAAGCGCACGCGCGCTGCGTGTTCCCGCCGCGTGACA
CGGCCCGCGATTCCTGAGAGCGAGTTGGTGACGTGAACCCATGGC (SEQ ID NO: 681;
Dermoptera Alignment consensus sequence 100%_Identity)

[0176] In some embodiments, the promoter comprises a nucleotide sequence having at least 85%, 90%, 95%, 96%, 97%, 98%, 99%, or 100% identity to nucleotides 20-227 of SEQ ID NO: 681 or a functional fragment or variant (e.g., codon optimized) thereof.

### Hyracoidae H1 Promoters

[0177] In certain embodiments, the promoter comprises an Hyracoidae H1 promoter. An alignment of Hyracoidae H1 promoter sequences is provided in FIG. 10 (wherein sequences numbered 1-2 in FIG. 10 correspond to SEQ ID NOs: 682 and 683, and consensus/100%, consensus/90%, consensus/80% and consensus/70% correspond to SEQ ID NOs: 1831-1834, respectively). In some embodiments, the promoter comprises a nucleotide sequence having at least 85%, 90%, 95%, 96%, 97%, 98%, 99%, or 100% identity to nucleotides 20-259 of any one of the sequences in FIG. 10 or a functional fragment or variant (e.g., codon optimized) thereof.

### Insectavora H1 Promoters

[0178] In certain embodiments, the promoter comprises an Insectavora H1 promoter. An alignment of Insectavora H1 promoter sequences is provided in FIG. 11 (wherein sequences numbered 1-8 in FIG. 11 correspond to SEQ ID NOs: 684-691, and consensus/100%, consensus/90%, consensus/80% and consensus/70% correspond to SEQ ID NOs: 1835-1838, respectively). In some embodiments, the promoter comprises a nucleotide sequence having at least 85%, 90%, 95%, 96%, 97%, 98%, 99%, or 100% identity to nucleotides 20-279 of any one of the sequences in FIG. 11 or a functional fragment or variant (e.g., codon optimized) thereof.

[0179] In certain embodiments, the Insectavora H1 promoter comprises a sequence selected from those in TABLE 9.

TABLE 9

| | |
|---|---|
| Insectavora | TGAGCTTCCCTCCGCCCTAYCRGCGTAAAVSRRBKCKTASMWMRRAYTTAT |
| Alignment | AAGGMYCYCWTASYTHWRGMYRTWTYWYDGTTAGGGTGACTTCCCACAAKM |
| consensus | CATAGCGAYATGYAAATATRRVGGSGCGKGTYTCYCCKVGGTCYYHGYYYW |
| sequence | GKMGGCGKCWTCTYHCSARGWCGCARGCGCRYTGMKCGCCYGTTCCCGCCC |
| 75%_Identity | KGTCAMYMYWGVYCTGTCACTATTGTCATTCCSRBCWTTCYSGGVSVMKKY |
| | TRATGACGTCARCRYYTMGKYTCCATGGCG (SEQ ID NO: 692) |
| Insectavora | TGAGCTTCCCTCCGCCCTAYCRGCSTAAAVVVNBKCKTWSMWMRNAYTTAT |
| Alignment | AAGGMYCNCWKABYTHWRGMYRYWTYWYDGTTAGGGTRACTTCCCACRAKV |
| consensus | CAYAGCGRYATGYAAATABRRVGSSGYKDGYYYVYCCNVGGTCYYHGBYYW |
| sequence | RKVKGCRKSDTCTYHCSARGWCGCVNGCGCRYTGMKCGCCNSTTCCCGCMM |
| 85%_Identity | BGTYAMYMYWGVYSTGTCACTATTGTCATTCCSVBCWTTCYSGGVSVMKKY |
| | TRATGACBTCARCRYYYMRNYTMCATGGCG (SEQ ID NO: 693) |
| Insectavora | TGAGCTTCCCTCCGCCCTAYCRGCSYARRVVVNNBCKYWBVDVVNMYTTAT |
| Alignment | AAGGMBCNCHKRBBYNHVGMYVYWKHWBDSTTAGGGTRACTTCCCAYRRKV |
| consensus | CRYRGCGRYATKYAAATABRRVGSSGYKDGYYYVBYCNVGGTCYYHGBYYW |
| sequence | RKVKGCRKSDTCTBNYBRRRWCGCVNGYGCDBYGMDCGCCNSYTCCCGYMM |
| 90%_Identity | BKTYMMYMYWGVYSTGTCACTATTGTCATTCCSVBCWTYYYVGKVSNMKKY |
| | TRRTGACBTCWRCRYYYMRNYTMCATGGCG (SEQ ID NO: 694) |
| Insectavora | TGAGCTTCCCTCCGCCCTAYCRGCSYARRVVVNNBCKYWBVDVVNMYTTAT |
| Alignment | AAGGMBCNCHKRBBYNHVGMYVYWKHWBDSTTAGGGTRACTTCCCAYRRKV |
| consensus | CRYRGCGRYATKYAAATABRRVGSSGYKDGYYYVBYCNVGGTCYYHGBYYW |
| sequence | RKVKGCRKSDTCTBNYBRRRWCGCVNGYGCDBYGMDCGCCNSYTCCCGYMM |
| 95%_Identity | BKTYMMYMYWGVYSTGTCACTATTGTCATTCCSVBCWTYYYVGKVSNMKKY |
| | TRRTGACBTCWRCRYYYMRNYTMCATGGCG (SEQ ID NO: 695) |
| Insectavora | TGAGCTTCCCTCCGCCCTAYCRGCSYARRVVVNNBCKYWBVDVVNMYTTAT |
| Alignment | AAGGMBCNCHKRBBYNHVGMYVYWKHWBDSTTAGGGTRACTTCCCAYRRKV |
| consensus | CRYRGCGRYATKYAAATABRRVGSSGYKDGYYYVBYCNVGGTCYYHGBYYW |
| sequence | RKVKGCRKSDTCTBNYBRRRWCGCVNGYGCDBYGMDCGCCNSYTCCCGYMM |
| 99%_Identity | BKTYMMYMYWGVYSTGTCACTATTGTCATTCCSVBCWTYYYVGKVSNMKKY |
| | TRRTGACBTCWRCRYYYMRNYTMCATGGCG (SEQ ID NO: 696) |
| Insectavora | TGAGCTTCCCTCCGCCCTAYCRGCSYARRVVVNNBCKYWBVDVVNMYTTAT |
| Alignment | AAGGMBCNCHKRBBYNHVGMYVYWKHWBDSTTAGGGTRACTTCCCAYRRKV |
| consensus | CRYRGCGRYATKYAAATABRRVGSSGYKDGYYYVBYCNVGGTCYYHGBYYW |
| sequence | RKVKGCRKSDTCTBNYBRRRWCGCVNGYGCDBYGMDCGCCNSYTCCCGYMM |
| 100%_Identity | BKTYMMYMYWGVYSTGTCACTATTGTCATTCCSVBCWTYYYVGKVSNMKKY |
| | TRRTGACBTCWRCRYYYMRNYTMCATGGCG (SEQ ID NO: 697) |

[0180] In some embodiments, the promoter comprises a nucleotide sequence having at least 85%, 90%, 95%, 96%, 97%, 98%, 99%, or 100% identity to nucleotides 20-278 of any one of SEQ ID NOs: 692-697 or a functional fragment or variant (e.g., codon optimized) thereof.

### Lagomorpha H1 Promoters

[0181] In certain embodiments, the promoter comprises a Lagomorpha H1 promoter. An alignment of Lagomorpha H1 promoter sequences is provided in FIG. 12 (wherein sequences numbered 1-8 in FIG. 12 correspond to SEQ ID NOs: 698-705, and consensus/100%, consensus/90%, consensus/80% and consensus/70% correspond to SEQ ID NOs: 1839-1842, respectively). In some embodiments, the promoter comprises a nucleotide sequence having at least 85%, 90%, 95%, 96%, 97%, 98%, 99%, or 100% identity to nucleotides 20-233 of any one of the sequences in FIG. 12 or a functional fragment or variant (e.g., codon optimized) thereof.

[0182] In certain embodiments, the Lagomorpha H1 promoter comprises a sequence selected from those in TABLE 10.

TABLE 10

| Lagomorpha | TGAGCTTCCTCCGCCCTATGGGGAGAGSTGGRYCCRADCAGACTTTATAAA |
|---|---|
| Alignment | GCTCCGAAARCCCAAGGCATCTTTCCCTTACGGTRGCTTCCCACAAGACAT |
| consensus | AGCGACATGCAAATWTMTTGAHRHDKRCTTCACGACGCGCTTCTCGCCRCA |
| sequence | GCGCAAGCGCGCTGTGTGCTGACGCCSGGGRACGGGCCAGYGCGCGGTTCC |
| 75%_Identity | CGGGAGCGGGTTGATGACGTTMGATCTCCATGGCG (SEQ ID NO: |
| | 706) |
| Lagomorpha | TGAGCTTCCTCFCGCCCTATGGGGRRWGSTGGRYYCRADCAGMCTTTATAA |
| Alignment | AGCTCCRAARRYYCAAGRCATYTTTCCSTTACGGTRGCTTCCCACARKACA |
| consensus | YAGCGAYATGCAAATWKMTYGMHRHDNRVTTCRCGRMSCGCTTCYCGCCVC |
| sequence | RGCGCARGCGCGCTGKGYGCTGWCKCCSSKGRACGSGCCRGBKCGCGRTTC |
| 85%_Identity | CCGGGAGCKGGYTGATGACGTTMGRTCTCCATGGCG (SEQ ID NO: |
| | 707) |
| Lagomorpha | TGAGCTTCCTCCGCCCTAYGGGGRRWGSTGSRBYCRRDCAGMCTTTATAAA |
| Alignment | GCTCCRAARRYYCRAGRCATYTTTCYSTTACRGTRRYTTCCCACARKRCMY |
| consensus | AGCGAYATGCAAATHKMTYGMHRHDNVVKTCRCGRMSCSCKTCYCGCYVCR |
| sequence | GCGCARGCGCGCTGKRYGCTGWCKCCSSKRRACGSGCCRGBKCGCGRTTCC |
| 90%_Identity | CGGGAGCKGGYTGATGACGTTMGRTCTCCATGGCG (SEQ ID NO: |
| | 708) |
| Lagomorpha | TGAGCTTCCTCCGCCCTAYGGGGRRWGSTGSRBYCRRDCAGMCTTTATAAA |
| Alignment | GCTCCRAARRYYCRAGRCATYTTTCYSTTACRGTRRYTTCCCACARKRCMY |
| consensus | AGCGAYATGCAAATHKMTYGMHRHDNVVKTCRCGRMSCSCKTCYCGCYVCR |
| sequence | GCGCARGCGCGCTGKRYGCTGWCKCCSSKRRACGSGCCRGBKCGCGRTTCC |
| 95%_Identity | CGGGAGCKGGYTGATGACGTTMGRTCTCCATGGCG (SEQ ID NO: |
| | 709) |
| Lagomorpha | TGAGCTTCCTCCGCCCTAYGGGGRRWGSTGSRBYCRRDCAGMCTTTATAAA |
| Alignment | GCTCCRAARRYYCRAGRCATYTTTCYSTTACRGTRRYTTCCCACARKRCMY |
| consensus | AGCGAYATGCAAATHKMTYGMHRHDNVVKTCRCGRMSCSCKTCYCGCYVCR |
| sequence | GCGCARGCGCGCTGKRYGCTGWCKCCSSKRRACGSGCCRGBKCGCGRTTCC |
| 99%_Identity | CGGGAGCKGGYTGATGACGTTMGRTCTCCATGGCG (SEQ ID NO: |
| | 710) |
| Lagomorpha | TGAGCTTCCTCCGCCCTAYGGGGRRWGSTGSRBYCRRDCAGMCTTTATAAA |
| Alignment | GCTCCRAARRYYCRAGRCATYTTTCYSTTACRGTRRYTTCCCACARKRCMY |
| consensus | AGCGAYATGCAAATHKMTYGMHRHDNVVKTCRCGRMSCSCKTCYCGCYVCR |
| sequence | GCGCARGCGCGCTGKRYGCTGWCKCCSSKRRACGSGCCRGBKCGCGRTTCC |
| 100%_Identity | CGGGAGCKGGYTGATGACGTTMGRTCTCCATGGCG (SEQ ID NO: |
| | 711) |

[0183] In some embodiments, the promoter comprises a nucleotide sequence having at least 85%, 90%, 95%, 96%, 97%, 98%, 99%, or 100% identity to nucleotides 20-233 of any one of SEQ ID NOs: 706-711 or a functional fragment or variant (e.g., codon optimized) thereof.

### Marsupial H1 Promoters

[0184] In certain embodiments, the promoter comprises a Marsupial H1 promoter. An alignment of Marsupial H1 promoter sequences is provided in FIG. 13 (wherein sequences numbered 1-7 in FIG. 13 correspond to SEQ ID NOs: 712-718, and consensus/100%, consensus/90%, consensus/80% and consensus/70% correspond to SEQ ID NOs: 1843-1846, respectively). In some embodiments, the promoter comprises a nucleotide sequence having at least 85%, 90%, 95%, 96%, 97%, 98%, 99%, or 100% identity to nucleotides 20-270 of any one of the sequences in FIG. 13 or a functional fragment or variant (e.g., codon optimized) thereof.

[0185] In certain embodiments, the Marsupial H1 promoter comprises a sequence selected from those in TABLE 11.

TABLE 11

| | |
|---|---|
| Marsupial | TGAGCTTCCCYCCGCCCTAYGKNRSVVKSCCKCMHRRRSRSCKMTATATAA |
| Alignment | SGCTCRCMAAWYCMGTRCTMYTTCTWRCAGAGGGYGARWANYCCCRTGATM |
| consensus | CYYRGCGGYATGCAAAYARBAGNTYRCRTCAGAGYAGRGCRCRRYCWDCCR |
| sequence | STCYYTCCTAGCGCGGGAAATNCYRTTTTCTTCWKMRGTCNYMGGKRACRV |
| 75%_Identity | GCGCRTGCGCNNNAKMCWGWRRRYGRYCYNNNNNNRYRGKYYBGYSDGGAW |
| | TCGGTTKRGAGCRCYATGGC (SEQ ID NO: 719) |
| Marsupial | TGAGCTTCCCYCCGCCCTAYGKNRSVVKSCCKCMHRRRSRSCKMTATATAA |
| Alignment | SGCTCRCMAAWYCMGTRCTMYTTCTWRCAGAGGGYGARWANYCCCRTGATM |
| consensus | CYYRGCGGYATGCAAAYARBAGNTYRCRTCAGAGYAGRGCRCRRYCWDCCR |
| sequence | STCYYTCCTAGCGCGGGAAATNCYRTTTTCTTCWKMRGTCNYMGGKRACRV |
| 85%_Identity | GCGCRTGCGCNNNAKMCWGWRRRYGRYCYNNNNNNRYRGKYYBGYSDGGAW |
| | TCGGTTKRGAGCRCYATGGC (SEQ ID NO: 720) |
| Marsupial | TGAGCTTCCCYCCGCCCTAYGKNRSVVKSCCKCMHRRRSRSCKMTATATAA |
| Alignment | SGCTCRCMAAWYCMGTRCTMYTTCTWRCAGAGGGYGARWANYCCCRTGATM |
| consensus | CYYRGCGGYATGCAAAYARBAGNTYRCRTCAGAGYAGRGCRCRRYCWDCCR |
| sequence | STCYYTCCTAGCGCGGGAAATNCYRTTYTCTTCWKMRGTCNYMGGKRACRV |
| 90%_Identity | GCGCRTGCGCNNNAKMCWGWRRRYGRYCYNNNNNNRYRGKYYBGYSDGGAW |
| | TCGGTTKRGAGCRCYATGGC (SEQ ID NO: 721) |
| Marsupial | TGAGCTTCCCYCCGCCCTAYGKNRSVVKSCCKCMHRRRSRSCKMTATATAA |
| Alignment | SGCTCRCMAAWYCMGTRCTMYTTCTWRCAGAGGGYGARWANYCCCRTGATM |
| consensus | CYYRGCGGYATGCAAAYARBAGNTYRCRTCAGAGYAGRGCRCRRYCWDCCR |
| sequence | STCYYTCCTAGCGCGGGAAATNCYRTTYTCTTCWKMRGTCNYMGGKRACRV |
| 95%_Identity | GCGCRTGCGCNNNAKMCWGWRRRYGRYCYNNNNNNRYRGKYYBGYSDGGAW |
| | TCGGTTKRGAGCRCYATGGC (SEQ ID NO: 722) |
| Marsupial | TGAGCTTCCCYCCGCCCTAYGKNRSVVKSCCKCMHRRRSRSCKMTATATAA |
| Alignment | SGCTCRCMAAWYCMGTRCTMYTTCTWRCAGAGGGYGARWANYCCCRTGATM |
| consensus | CYYRGCGGYATGCAAAYARBAGNTYRCRTCAGAGYAGRGCRCRRYCWDCCR |
| sequence | STCYYTCCTAGCGCGGGAAATNCYRTTYTCTTCWKMRGTCNYMGGKRACRV |
| 99%_Identity | GCGCRTGCGCNNNAKMCWGWRRRYGRYCYNNNNNNRYRGKYYBGYSDGGAW |
| | TCGGTTKRGAGCRCYATGGC (SEQ ID NO: 723) |
| Marsupial | TGAGCTTCCCYCCGCCCTAYGKNRSVVKSCCKCMHRRRSRSCKMTATATAA |
| Alignment | SGCTCRCMAAWYCMGTRCTMYTTCTWRCAGAGGGYGARWANYCCCRTGATM |
| consensus | CYYRGCGGYATGCAAAYARBAGNTYRCRTCAGAGYAGRGCRCRRYCWDCCR |
| sequence | STCYYTCCTAGCGCGGGAAATNCYRTTYTCTTCWKMRGTCNYMGGKRACRV |
| 100%_Identity | GCGCRTGCGCNNNAKMCWGWRRRYGRYCYNNNNNNRYRGKYYBGYSDGGAW |
| | TCGGTTKRGAGCRCYATGGC (SEQ ID NO: 724) |

[0186] In some embodiments, the promoter comprises a nucleotide sequence having at least 85%, 90%, 95%, 96%, 97%, 98%, 99%, or 100% identity to nucleotides 20-270 ofany one of SEQ ID NOs: 719-724 or a functional fragment or variant (e.g., codon optimized) thereof.

### Pangolin H1 Promoters

[0187] In certain embodiments, the promoter comprises an Pangolin H1 promoter. An alignment of Pangolin H1 promoter sequences is provided in FIG. 14 (wherein sequences numbered 1-4 in FIG. 14 correspond to SEQ ID NOs: 725-728, and consensus/100%, consensus/90%, consensus/80% and consensus/70% correspond to SEQ ID NOs: 1847-1850, respectively). In some embodiments, the promoter comprises a nucleotide sequence having at least 85%, 90%, 95%, 96%, 97%, 98%, 99%, or 100% identity to nucleotides 20-255 of any one of the sequences in FIG. 14 or a functional fragment or variant (e.g., codon optimized) thereof.

[0188] In certain embodiments, the Pangolin H1 promoter comprises a sequence selected from those in TABLE 12.

TABLE 12

| | |
|---|---|
| Pangolin | TGAGCTTCCCTCCGCCCTATGGCAGAAAGCRGCCCGCCGCCGCATTTATAA |
| Alignment | GGCTCTCCCACCTAAAGCCATATAMTGGTTATGGTGACTTCCCAGAAKACA |
| consensus | TGGCAACATGCAAATATANTGCGGTMTACYTCCCCTGTBGCGCGTAGGCGT |
| sequence | CTCCTCCCCTGGACGMACGGGCGCNGCATGTTCCCGCCCTATGACTCTGGG |
| 75%_Identity | CCDGCGACTACGGGAGAGAGCTGATGACGTGACCGCGACCGCTCGGGBTCC |
| | ATGGCG (SEQ ID NO: 729) |
| Pangolin | TGAGCTTCCCTCCGCCCTAYRGMRRMMAGCRSCCCSSMSCNGCAYTTATAA |
| Alignment | GSCTCTCCCWMCTAAAGMCATWTRMYGRTTATGGTGACTTCCCASAAKACA |
| consensus | TRGCWACATGCAAATAYMNYGCGKTMTRCYKCCCCTGTBGCGCGTAGGCGT |
| sequence | CTCCYCCCCNGGACGMRYRGGCGCNGCRTKYYCYCSCYSTRTGACTCKRGG |
| 85%_Identity | CYDGCGACTACSGGAGMGNGCTGATGACGTGASCGCGACCGCTCGSGBTCC |
| | ATGGCG (SEQ ID NO: 730) |
| Pangolin | TGAGCTTCCCTCCGCCCTAYRGMRRMMAGCRSCCCSSMSCNGCAYTTATAA |
| Alignment | GSCTCTCCCWMCTAAAGMCATWTRMYGRTTATGGTGACTTCCCASAAKACA |
| consensus | TRGCWACATGCAAATAYMNYGCGKTMTRCYKCCCCTGTBGCGCGTAGGCGT |
| sequence | CTCCYCCCCNGGACGMRYRGGCGCNGCRTKYYCYCSCYSTRTGACTCKRGG |
| 90%_Identity | CYDGCGACTACSGGAGMGNGCTGATGACGTGASCGCGACCGCTCGSGBTCC |
| | ATGGCG (SEQ ID NO: 731) |
| Pangolin | TGAGCTTCCCTCCGCCCTAYRGMRRMMAGCRSCCCSSMSCNGCAYTTATAA |
| Alignment | GSCTCTCCCWMCTAAAGMCATWTRMYGRTTATGGTGACTTCCCASAAKACA |
| consensus | TRGCWACATGCAAATAYMNYGCGKTMTRCYKCCCCTGTBGCGCGTAGGCGT |
| sequence | CTCCYCCCCNGGACGMRYRGGCGCNGCRTKYYCYCSCYSTRTGACTCKRGG |
| 95%_Identity | CYDGCGACTACSGGAGMGNGCTGATGACGTGASCGCGACCGCTCGSGBTCC |
| | ATGGCG (SEQ ID NO: 732) |
| Pangolin | TGAGCTTCCCTCCGCCCTAYRGMRRMMAGCRSCCCSSMSCNGCAYTTATAA |
| Alignment | GSCTCTCCCWMCTAAAGMCATWTRMYGRTTATGGTGACTTCCCASAAKACA |
| consensus | TRGCWACATGCAAATAYMNYGCGKTMTRCYKCCCCTGTBGCGCGTAGGCGT |
| sequence | CTCCYCCCCNGGACGMRYRGGCGCNGCRTKYYCYCSCYSTRTGACTCKRGG |
| 99%_Identity | CYDGCGACTACSGGAGMGNGCTGATGACGTGASCGCGACCGCTCGSGBTCC |
| | ATGGCG (SEQ ID NO: 733) |
| Pangolin | TGAGCTTCCCTCCGCCCTAYRGMRRMMAGCRSCCCSSMSCNGCAYTTATAA |
| Alignment | GSCTCTCCCWMCTAAAGMCATWTRMYGRTTATGGTGACTTCCCASAAKACA |
| consensus | TRGCWACATGCAAATAYMNYGCGKTMTRCYKCCCCTGTBGCGCGTAGGCGT |
| sequence | CTCCYCCCCNGGACGMRYRGGCGCNGCRTKYYCYCSCYSTRTGACTCKRGG |
| 100%_Identity | CYDGCGACTACSGGAGMGNGCTGATGACGTGASCGCGACCGCTCGSGBTCC |
| | ATGGCG (SEQ ID NO: 734) |

[0189] In some embodiments, the promoter comprises a nucleotide sequence having at least 85%, 90%, 95%, 96%, 97%, 98%, 99%, or 100% identity to nucleotides 20-255 of any one of SEQ ID NOs: 729-734 or a functional fragment or variant (e.g., codon optimized) thereof.

### Perissodactyla H1 Promoters

[0190] In certain embodiments, the promoter comprises an Perissodactyla H1 promoter. An alignment of Perissodactyla H1 promoter sequences is provided in FIG. 15 (wherein sequences numbered 1-13 in FIG. 15 correspond to SEQ ID NOs: 735-747, and consensus/100%, consensus/90%, consensus/80% and consensus/70% correspond to SEQ ID NOs: 1851-1854, respectively). In some embodiments, the promoter comprises a nucleotide sequence having at least 85%, 90%, 95%, 96%, 97%, 98%, 99%, or 100% identity to nucleotides 20-251 of any one of the sequences in FIG. 15 or a functional fragment or variant (e.g., codon optimized) thereof.

[0191] In certain embodiments, the Perissodactyla H1 promoter comprises a sequence selected from those in TABLE 13.

TABLE 13

| | |
|---|---|
| Perissodactyla | TGAGCTTCCCTCCGCCCTAYGGRGMAAAMMDGCNCMMGGCRGCMTTTATAA |
| Alignment | GACTCACAKATCTAAAGMCATTTCACRRWTAGGGTGACTTCCCACARKRCA |
| consensus | CAGCGAYATGCAAAYATMGYGGRGCGTGCCTYYCCWGTMYCYKGYGGGCAT |
| sequence | CTNNNCKCCTRSACGCACGCGCGCCGSGTGTTCCCGCSCTGTGACKCTAGG |
| 75%_Identity | YRRGCSHTTCMTGGGAGAGRGTTGATGACGKCARCATTCGGRCTCCATGGC |
| | G (SEQ ID NO: 748) |
| Perissodactyla | TGAGCTTCCCTCCGCCCTAYGGRGMAAAVMDGCNCMMGGCRGCMTTTATAA |
| Alignment | GACTCACAKATCTAAAGMCATTTCACRRWTAGGGTGACTTCCCACARKRCA |
| consensus | CAGCGAYATGCAAAYATMGYGGRGCGTGCCTYYCCWGTMYCYKGYGGGYAT |
| sequence | CTNNNCKCCTRSACGCACGCGCGCCGSGTGTTCCCGCSCTGTGACKCTAGG |
| 85%_Identity | YRRGCSHTTCMTGGGAGAGRGTTGATGACGKCARCATTCGGRCTCCATGGC |
| | G (SEQ ID NO: 749) |
| Perissodactyla | TGAGCTTCCCTCCGCCCTMYGRRGVAARVMDGNCNCHHRGCDGCMTTTATA |
| Alignment | AGACTCACAKRTCTRAAGMCATTTMACRRWTAGGGTGACTTCCCACARKRC |
| consensus | ACAGCGAYATGCAAAYATMGYGGRRYGTRCYTYYCCWGTMYCYKGYGGGYA |
| sequence | TCTNNNCKCCTRSACGCACGCGCRCCGSGTGTTCCCGCSCTGTGWCKCTAG |
| 90%_Identity | GYRRGCSHTTCMTGGGAGRGRGKTGATGAYGKCARCAYTCGGVCTCCATGG |
| | CG (SEQ ID NO: 750) |
| Perissodactyla | TGAGCTTCCCTCCGCYCTMYRRRGVARRVMDGNCNMHHRGCDGCMTTTATA |
| Alignment | AGACTCACAKRTCTRAAGMCATTTMACRRWTAGGGTGACTTCCCACARKVC |
| consensus | ACAGCRAYATGCAAAYATMGYGGRRYGYRCYTYYCCWGTMYCBKGYRGGYA |
| sequence | TCTNNNCKCCTRSACGCACGCGCRCCGSGTGTTCCCGCSCTGTGWCKCTAG |
| 95%_Identity | GYRRGCSHTTCMYGRGRGRGRGKTGATGAYGKCARCMYTCGGVCTCMATGG |
| | CG (SEQ ID NO: 751) |
| Perissodactyla | TGAGCTTCCCTCCGCYCTMYRRRGVARRVMDGNCNMHHRGCDGCMTTTATA |
| Alignment | AGACTCACAKRTCTRAAGMCATTTMACRRWTAGGGTGACTTCCCACARKVC |
| consensus | ACAGCRAYATGCAAAYATMGYGGRRYGYRCYTYYCCWGTMYCBKGYRGGYA |
| sequence | TCTNNNCKCCTRSACGCACGCGCRCCGSGTGTTCCCGCSCTGTGWCKCTAG |
| 99%_Identity | GYRRGCSHTTCMYGRGRGRGRGKTGATGAYGKCARCMYTCGGVCTCMATGG |
| | CG (SEQ ID NO: 752) |
| Perissodactyla | TGAGCTTCCCTCCGCYCTMYRRRGVARRVMDGNCNMHHRGCDGCMTTTATA |
| Alignment | AGACTCACAKRTCTRAAGMCATTTMACRRWTAGGGTGACTTCCCACARKVC |
| consensus | ACAGCRAYATGCAAAYATMGYGGRRYGYRCYTYYCCWGTMYCBKGYRGGYA |
| sequence | TCTNNNCKCCTRSACGCACGCGCRCCGSGTGTTCCCGCSCTGTGWCKCTAG |
| 100%_Identity | GYRRGCSHTTCMYGRGRGRGRGKTGATGAYGKCARCMYTCGGVCTCMATGG |
| | CG (SEQ ID NO: 753) |

[0192] In some embodiments, the promoter comprises a nucleotide sequence having at least 85%, 90%, 95%, 96%, 97%, 98%, 99%, or 100% identity to nucleotides 20-250 of any one of SEQ ID NOs: 748-753 or a functional fragment or variant (e.g., codon optimized) thereof.

### Primate H1 Promoters

[0193] In certain embodiments, the promoter comprises a Primate H1 promoter. An alignment of Primate H1 promoter sequences is provided in FIG. 16 (wherein sequences numbered 1-30 in FIG. 16 correspond to SEQ ID NOs: 754-783, and consensus/100%, consensus/90%, consensus/80% and consensus/70% correspond to SEQ ID NOs: 1855-1858, respectively). FIG. 17 provides an second alignment of H1 promoter sequences from Primate species showing the TATA box, PSE, Staf, and DSE binding sites. Sequences numbered 1-30 in the alignment correspond to SEQ ID NOs: 755, 758, 759, 756, 757, 780, 783, 754, 761, 760, 769, 781, 765, 779, 771, 783, 766, 770, 774, 763, 764, 767, 772, 762, 775, 776, 777, 768, 773, and 788, respectively. The consensus sequence shown in FIG. 17 corresponds to SEQ ID NO: 1868. In some embodiments, the promoter comprises a nucleotide sequence having at least 85%, 90%, 95%, 96%, 97%, 98%, 99%, or 100% identity to nucleotides 20-267 of any one of the sequences in FIG. 16 or FIG. 17 or a functional fragment or variant (e.g., codon optimized) thereof. In certain embodiments, a functional fragment of a primate H1 promoter comprises at least a TATA box, or a PSE, Staf, or DSE binding site.

[0194] In certain embodiments, the Primate H1 promoter comprises a sequence selected from those in TABLE 14.

TABLE 14

| | |
|---|---|
| Primate | TGAGCTTCCCTCCGCCCTATGRGRAARRGTGGTYCYAYNCAGAACTTATAA |
| Alignment | GRYTCCCAWAYYYAAAGACATTTCWCGWTTATGGTGAYTTCCCAGAABACA |
| consensus | YAGCGACATGCAAATATTGYAGGGCGTSMCWCCCCTGTCCCTYACRGYCRT |
| sequence | CTTCCTGCCAGGGCGCACGCGCGCTGGGTGTTCCCGCSTAGTGACDCTGGG |
| 75%_Identity | CCCGCGATTCCTTGGAGCGGGTTGATGACGTCAGCGTTCGAATTCCATGGC |
| | G (SEQ ID NO: 784) |
| Primate | TGAGCTTCCCTCCGCCCTAYGRGRAARRVKRRKYYYDYNSAGARYTTATAA |
| Alignment | GRYTCCCADAYYYAAAGACATTTCWCSWTTATGGTGAYTTCCCASAABMCA |
| consensus | YAGCGACATGCAAATATYGYAGGKCGYSMCWCSCCKGTCCCWYACRGBCRT |
| sequence | CWWCYYKCCAGDGCGCACGCGCGCTGSGTGTNCCCGCSWNSTGACDCTGGG |
| 85%_Identity | CYCGCGATTCCTBGGAGCGGGTTGRTGACGTCAGCKYYSGWRYTYCATGGC |
| | G (SEQ ID NO: 785) |
| Primate | TGAGCTTCCCTCCGCCCTAYGRGRRARRVKRRKBYYDYNSAGARYTTATAA |
| Alignment | GRYTCCCADAYYYDAAGACATTTYWCSWTTATGGTGAYTTCCCASAABMCA |
| consensus | YAGCGACATGCAAATATYKYAGGKCGYVHCWCSCCKGTCCYWYANRGBCRT |
| sequence | CWWCYYKCCAGDGCGCVCGCGCGCTGSGTGTNNCCCGCSWNSTGACDCTGS |
| 90%_Identity | GCYCGCGATTCCTBNGAGCGGGTTGRTRACGTCAGCKYYSGWRYKYCATGG |
| | CG (SEQ ID NO: 786) |
| Primate | TGAGCTTCCCTCCGCCCTAYSVSNRARRVBNVKBHYDBNBVSWNYTTATAA |
| Alignment | GRYTYNCANWYBBDRAVMBMTTTNWHSDTTAYGGTGAYTTCCCASAABVCA |
| consensus | YAGCGACATGCAAATATNKYRGRKCGYVHYWCNNCHDSTNNYNNNNDNBNN |
| sequence | WCDNCYHNYCVNDGCGCVCGCGCRCTNBRYKTNNCNCGCNNNSDNSKGACD |
| 95%_Identity | CNNNGCYCGSGRTTCVTBNSANCGRGTNGNKNACGTCARHKNYBSNNNNYC |
| | ATGGCG (SEQ ID NO: 787) |
| Primate | TGAGCTTCCCTCCGCCYTRYSVSNVRRRNBNNBNHHNBNBVSWNYTTATAA |
| Alignment | RRYTYNCANHHNBDRRVMBMTTTNWHBDTKABGGTGAYTTCCCABMABVCR |
| consensus | YWGCKMCATGYAAANRKNBHVSRDYSYVNNNNNNNNNNNCHDVNNNNNNNN |
| sequence | NNNNNNNNNNNNNNNCVNNGYGSVCKCKCRYKNNVYKTNNNNCGCNNNSDN |
| 99%_Identity | NNNNNNSNGWYNSNNNRCYCRSGDTTSVNNNNNNCKNGNNNNNNACSTSAR |
| | HNNNNNNNNNHMATGGCG (SEQ ID NO: 788) |
| Primate | TGAGCTTCCCTCCGCCYTRYSVSNVRRRNBNNBNHHNBNBVSWNYTTATAA |
| Alignment | RRYTYNCANHHNBDRRVMBMTTTNWHBDTKABGGTGAYTTCCCABMABVCR |
| consensus | YWGCKMCATGYAAANRKNBHVSRDYSYVNNNNNNNNNNNCHDVNNNNNNNN |
| sequence | NNNNNNNNNNNNNNNCVNNGYGSVCKCKCRYKNNVYKTNNNNCGCNNNSDN |
| 100%_Identity | NNNNNNSNGWYNSNNNRCYCRSGDTTSVNNNNNNCKNGNNNNNNACSTSAR |
| | HNNNNNNNNNHMATGGCG (SEQ ID NO: 789) |

[0195] In some embodiments, the promoter comprises a nucleotide sequence having at least 85%, 90%, 95%, 96%, 97%, 98%, 99%, or 100% identity to nucleotides 20-250 of any one of SEQ ID NOs: 784-789 or a functional fragment or variant (e.g., codon optimized) thereof.

### Rodent H1 Promoters

[0196] In certain embodiments, the promoter comprises a Rodent H1 promoter. An alignment of Rodent H1 promoter sequences is provided in FIG. 18 (wherein sequences numbered 1-114 in FIG. 18 correspond to SEQ ID NOs: 790-903 or 1859, and consensus/100%, consensus/90%, consensus/80% and consensus/70% correspond to SEQ ID NOs: 1860-1863, respectively). In some embodiments, the promoter comprises a nucleotide sequence having at least 85%, 90%, 95%, 96%, 97%, 98%, 99%, or 100% identity to nucleotides 20-296 any one of the sequences in FIG. 18 or a functional fragment or variant (e.g., codon optimized) thereof.

[0197] In certain embodiments, the Rodent H1 promoter a sequence selected from those in TABLE 15.

TABLE 15

| | |
|---|---|
| Rodent | TGAGCTTCCYYCSSCCMYHTRRRRVRDRBDSRBYWSCMRGCVRVMHYTATA |
| Alignment | AGRCTCSMAWRYMKVMRKRHATTTYWAYRVTYAYGGTGRYTTCCCACAAVR |
| consensus | CACAGCGMKACGGTGYWRATWTRSMWGRGHGYRYCKYSCCCMSBKSBNGBC |
| sequence | CDSYCVKSATTTGCATGTBTYYTMDCYTVRGGCTKCMYGCKCRCTAGCGCG |
| 75%_Identity | CATACTGCRKGKYSMSRGMCWRKGACAGTGMNWRAGCCYGCGMWTCCCGSC |
| | YSGGMRMKRGNTGATGACGTCATCCCCRKCSYYYRARCKCSATGGCG |
| | (SEQ ID NO: 904) |
| Rodent | TGAGCTTCCYYCSSCCVYHTRVRRVVDDBDNDBYHVCVRSSVRVVHYTATA |
| Alignment | AGRSTCSVRDRBVKVMRBVHAYTTYWAYRVTYABGGTRRYTWCCCACAANR |
| consensus | CAYAGCGMBVCGGWSYWDATWTVSMDRRSHSYRYYKYVYCCHVBKVBNGBC |
| sequence | CNBBYVKBATTTGCATGTBYYBTHDYYTVVRSCTKCMBGYKCNCWMGCGCG |
| 85%_Identity | CAYRCTGYRKRKHSMSRRMMDRKGACAGTGMNHRRSCCHGCGMWTYCCGSY |
| | YSGGMRVDRRNTGATGACGTCATCCCCRKSSYYYRARMKCSATGGCG |
| | (SEQ ID NO: 905) |
| Rodent | TGAGCTTCCYYCSSCCVYHYDVRRNVNDNDNDBYHVCVRSSVRVVHYTATA |
| Alignment | AGRBKCVVRDRBVBVVVBVNMYYTHWAYRNTYABGGTRRYTWCCCASAANR |
| consensus | CAYAGCGHBVCGGWSYWDATWTVVHDRRSHNYRYYBYVBCCHVBBVNNNBC |
| sequence | CNBBBVDBATTTGCATGTBYBBTHNBYTNNRNCTBCMBRYKMNCWMGCGCG |
| 90%_Identity | CAYRCYRYRBRKHSVBRRMMNRKSACAGTGMNHRRSCSHGMGMWBYCCGSY |
| | YSGGHDVDRRNTGRTGACRTCATCCCCRKBSYYYRRVMKCSATGGCG |
| | (SEQ ID NO: 906) |
| Rodent | TGAGCTTCCYYCSVCCVYNHDNVVNNNNNNNNNBNVCNDVNVRVVNYWAWA |
| Alignment | ARVNKYVVRNRBVNNVVBVNMYBTHWAHRNTBRBGGTRRYTWCCCASRANR |
| consensus | CRYWGCGHNVCGGHSYWNATWKNVHDRRVHNBNBBBYNNCCNVNBNNNNNN |
| sequence | CNNNBNDBATTTGCATGTBBBNKHNBBTNNVNCTBYHNRYBMNCWMGCGCG |
| 95%_Identity | CAYRCYRYRBVKNBVBVVMVNRDSMSAGTGMNHRRBCSNKHRVDBYCCGSY |
| | YBGSHDVNDDNTGRTGACRTCATCCCCRKBVYYYVRVHKCBATGGCG |
| | (SEQ ID NO: 907) |
| Rodent | TGAGCTTCCYHCNVCCNBNNNNVVNNNNNNNNNBNNCNNVNNVVNNHWWWA |
| Alignment | ARVNBHNVRNVNNNNNVNNNVBNYHNAHRNTBRBGGYVRYTWCCCABRANV |
| consensus | CRYDRCGHNVCGGHSYHNATNDNNHNRNVNNNNNBBNNNCCNNNNNNNNNN |
| sequence | HNNNNNNNATTTGCATGTBBBNBNNBBTNNNNCTBYNNDYBHNSWMGCGCG |
| 99%_Identity | CAYRCBRNDNVBNNVBNVVVNVNVVSAGTGMNNNNNBSNDNDNNBYCCGVN |
| | BBGVNDNNNDNYGDBGACVTCATCCCCDBNNHBHVRVHKYBATGGCG |
| | (SEQ ID NO: 908) |
| Rodent | TGAGCTTCCYHCNVCCNNNNNNVNNNNNNNNNNBNNCNNVNNVNNNHWWWA |
| Alignment | RRVNNNNVVNVNNNNNNNNNVBNYHNANVNWBRBGRYVDYKDCCMRBRANV |
| consensus | YDHDRCRNNVCGGHSYHNMYNNNNNNDNVNNNNNBBNNNCCNNNNNNNNNN |
| sequence | HNNNNNNNATTTGCATGTBBBNBNNBBTNNNNCTBHNNDHNHNSWMGCGCG |
| 100%_Identity | CAYRCBRNDNVBNNVBNVVVNNNVVSAGTGMNNNNNBBNNNDNNBYCCGVN |
| | BNSNNDNNNNNBRDBGACVYCATCCCYNBNNHBNVDNNDBNATGGCG |
| | (SEQ ID NO: 909) |

[0198] In some embodiments, the promoter comprises a nucleotide sequence having at least 85%, 90%, 95%, 96%, 97%, 98%, 99%, or 10000 identity to nucleotides 20-296 of any one of SEQ ID NOs: 904-909 or a functional fragment or variant (e.g., codon optimized) thereof.

### Xenarthra H1 Promoters

[0199] In certain embodiments, the promoter comprises an Xenarthra H1 promoter. An alignment of Xenarthra H1 promoter sequences is provided in FIG. 19 (wherein sequences numbered 1-10 in FIG. 19 correspond to SEQ ID NOs: 910-919, and consensus/100%, consensus/90%, consensus/80% and consensus/70% correspond to SEQ ID NOs: 1864-1867, respectively). In some embodiments, the promoter comprises a nucleotide sequence having at least 85%, 90%, 95%, 96%, 97%, 98%, 99%, or 100% identity to nucleotides 20-234 of any one of the sequences in FIG. 19 or a functional fragment or variant (e.g., codon optimized) thereof.

[0200] In certain embodiments, the Xenarthra H1 promoter comprises a sequence selected from those in TABLE 16.

TABLE 16

| Xenarthra | TGAGCTTCCCTCCGCCCKATARRRARMVHSVDKYBTANGCDGGATTTATAA |
|---|---|
| Alignment | GAYWCCCAYAKCTAAAGMCATTTCWCRGTTAYGGTGNACTTCCCACWACAC |
| consensus | AYRGCGAWATGCAAATATNGYGGARSWGKYSCTGAGGCGTGGTMRRGCGCR |
| sequence | CGCGCGCTGMGAGTTCCCGCCYTKYGGYSCTRGGCYSRAGATKCCTGAGAR |
| 75%_Identity | CKGGYTGATGACGKCWRCGTTYGGRCKCCATGGCG (SEQ ID NO: |
| | 920) |
| Xenarthra | TGAGCTTCCCTCCGCCCKRTRRRRHRMVHVVDKYBTWNRCDGGATTTATAA |
| Alignment | GAYWCCCAYWKCTAHRGMCATTTSWCRGTTAYGGTGNACTTCCCACWABAC |
| consensus | HYRGCGAWATGCAAATATNRYGGARBWGKYSCTGAGGCGYGGYVRRRCGCR |
| sequence | VGCGCGCTGMGAGTTCCCGCCYTBYSRYSCTRGGYYSNAGRTKCCTGRRRR |
| 85%_Identity | CKGGYTGAWSACKKCWRYGTTYGGRYKCMATGGCG (SEQ ID NO: |
| | 921) |
| Xenarthra | TGAGCTTCCCTCCGCCCKRTRRRRHRMVHVVDKYBTWNRCDGGATTTATAA |
| Alignment | GAYWCCCAYWKCTAHRGMCATTTSWCRGTTAYGGTGNACTTCCCACWABAC |
| consensus | HYRGCGAWATGCAAATATNRYGGARBWGKYSCTGAGGCGYGGYVRRRCGCR |
| sequence | VGCGCGCTGMGAGTTCCCGCCYTBYSRYSCTRGGYYSNAGRTKCCTGRRRR |
| 90%_Identity | CKGGYTGAWSACKKCWRYGTTYGGRYKCMATGGCG (SEQ ID NO: |
| | 922) |
| Xenarthra | TGAGCTTCCCTCCGCCCBRYRRRRHRMNNVNDNBYBWWNRCNGGAYTTATA |
| Alignment | AGRYWCCCAHWKCWAHRKMYATTTSWYRRTTABGGTGNAYTTCCCASWABA |
| consensus | CHYRGCGAWATGCAAATATNRYGGARBDGKYVCKGAGGCKYGGYVRRRMGC |
| sequence | RVGCGCGCTGVKASTTCCCGCCBKBYSRYSMTRGKYYBNAGRTKCCTGRRR |
| 95%_Identity | RSKGGHTGAWSASKBYDRYGTTYGKRYDCMATGGCG (SEQ ID NO: |
| | 923) |
| Xenarthra | TGAGCTTCCCTCCGCCCBRYRRRRHRMNNVNDNBYBWWNRCNGGAYTTATA |
| Alignment | AGRYWCCCAHWKCWAHRKMYATTTSWYRRTTABGGTGNAYTTCCCASWABA |
| consensus | CHYRGCGAWATGCAAATATNRYGGARBDGKYVCKGAGGCKYGGYVRRRMGC |
| sequence | RVGCGCGCTGVKASTTCCCGCCBKBYSRYSMTRGKYYBNAGRTKCCTGRRR |
| 99%_Identity | RSKGGHTGAWSASKBYDRYGTTYGKRYDCMATGGCG (SEQ ID NO: |
| | 924) |
| Xenarthra | TGAGCTTCCCTCCGCCCBRYRRRRHRMNNVNDNBYBWWNRCNGGAYTTATA |
| Alignment | AGRYWCCCAHWKCWAHRKMYATTTSWYRRTTABGGTGNAYTTCCCASWABA |
| consensus | CHYRGCGAWATGCAAATATNRYGGARBDGKYVCKGAGGCKYGGYVRRRMGC |
| sequence | RVGCGCGCTGVKASTTCCCGCCBKBYSRYSMTRGKYYBNAGRTKCCTGRRR |
| 100%_Identity | RSKGGHTGAWSASKBYDRYGTTYGKRYDCMATGGCG (SEQ ID NO: |
| | 925) |

[0201] In some embodiments, the promoter comprises a nucleotide sequence having at least 85%, 90%, 95%, 96%, 97%, 98%, 99%, or 100% identity to nucleotides 20-233 of any one of SEQ ID NOs: 920-925 or a functional fragment or variant (e.g., codon optimized) thereof.

### Gar1 Promoters

[0202] A custom perl script was developed to compare the 5′ transcriptional start sites of pol III genes with that of pol II genes. The results were filtered for those that are orientated in opposite directions (divergent transcription). One compact bidirectional promoter identified using this method was the Gar1 promoter. On one side, the GAR1 promoter expresses the GAR1 protein, which is involved with snoRNAs, rRNA processing, and telomerase activity. The GAR1 protein appears to be expressed in all tissues, suggesting that the GAR1 promoter can drive expression ubiquitously (on the world wide web at proteinatlas.org/ENSG00000109534-GAR1/tissue). On the other side, it expresses a lncRNA (AC126283.1 or ENSG00000272795) with unknown function, and high expression in the testis.

[0203] Accordingly in certain embodiments, the promoter is a Gar1 promoter. In certain embodiments, the Gar1 promoter is a mammalian promoter, e.g., a human Gar1 promoter, a carnivora Gar1 promoter, a primate Gar1 promoter, or a rodent Gar1 promoter. In some embodiments, the Gar1 promoter comprises a nucleotide sequence having at least 85%, 90%, 95%, 96%, 97%, 98%, 99%, or 100% identity of any one of SEQ ID NOs: 107-203 or a codon-optimized variant and/or fragment thereof. In some embodiments, the promoter comprises the nucleotide sequence of any one of SEQ ID NOs: 107-203 or a codon-optimized variant and/or fragment thereof.

[0204] In certain embodiments, a functional fragment comprises a truncation of from about 10 bases to about 70 bases at the 5′ end, the 3′ end, or both the 5′ and 3′ ends of any one of SEQ ID NOs: 107-203 or a variant thereof (e.g., a variant having at least 85%, 90%, 95%, 96%, 97%, 98%, 99%, or 100% identity to any one of SEQ ID NOs: 107-203). In certain embodiments, a functional fragment comprises a truncation of about 10 bases at the 5′ end, the 3′ end, or both the 5′ and 3′ ends of any one of SEQ ID NOs: 107-203 or a variant thereof (e.g., a variant having at least 85%, 90%, 95%, 96%, 97%, 98%, 99%, or 100% identity to any one of SEQ ID NOs: 107-203). In certain embodiments, a functional fragment comprises a truncation of about 20 bases at the 5′ end, the 3′ end, or both the 5′ and 3′ ends of any one of SEQ ID NOs: 107-203 or a variant thereof (e.g., a variant having at least 85%, 90%, 95%, 96%, 97%, 98%, 99%, or 100% identity to any one of SEQ ID NOs: 107-203). In certain embodiments, a functional fragment comprises a truncation of about 30 bases at the 5′ end, the 3′ end, or both the 5′ and 3′ ends of any one of SEQ ID NOs: 107-203 or a variant thereof (e.g., a variant having at least 85%, 90%, 95%, 96%, 97%, 98%, 99%, or 100% identity to any one of SEQ ID NOs: 107-203). In certain embodiments, a functional fragment comprises a truncation of about 40 bases at the 5′ end, the 3′ end, or both the 5′ and 3′ ends of any one of SEQ ID NOs: 107-203 or a variant thereof (e.g., a variant having at least 85%, 90%, 95%, 96%, 97%, 98%, 99%, or 100% identity to any one of SEQ ID NOs: 107-203). In certain embodiments, a functional fragment comprises a truncation of about 50 bases at the 5′ end, the 3′ end, or both the 5′ and 3′ ends of any one of SEQ ID NOs: 107-203 or a variant thereof (e.g., a variant having at least 85%, 90%, 95%, 96%, 97%, 98%, 99%, or 100% identity to any one of SEQ ID NOs: 107-203). In certain embodiments, a functional fragment comprises a truncation of about 60 bases at the 5′ end, the 3′ end, or both the 5′ and 3′ ends of any one of SEQ ID NOs: 107-203 or a variant thereof (e.g., a variant having at least 85%, 90%, 95%, 96%, 97%, 98%, 99%, or 100% identity to any one of SEQ ID NOs: 107-203). In certain embodiments, a functional fragment comprises a truncation of about 70 bases at the 5′ end, the 3′ end, or both the 5′ and 3′ ends of any one of SEQ ID NOs: 107-203 or a variant thereof (e.g., a variant having at least 85%, 90%, 95%, 96%, 97%, 98%, 99%, or 100% identity to any one of SEQ ID NOs: 107-203).

[0205] In certain embodiments, the functional fragment comprise at least a transcription factor binding site. Identification of transcription factor binding sites can be determined by consensus, or by using a differential distance matrix or multidimensional scaling (De Bleser P. et al. (2007) Genome Biol 8(5):R83.

[0206] In certain embodiments, the Gar promoter comprises a TATA mutation. In certain embodiments, the TATA mutation is a TATAA→TCGAA mutation.

[0207] In certain embodiments, a nucleic acid comprising a Gar1 promoter described herein further comprises a 5′UTR including at least a portion of a beta-globin 5′UTR sequence or a Kozak sequence. In certain embodiments, the 5′UTR includes the nucleotide sequence 5′-GCCGCCACC-3′ (SEQ ID NO: 256), or a 6 bp, a 7 bp, or an 8 bp fragment thereof. In certain embodiments, the 6 bp fragment is 5′-GCCACC-3′ (SEQ ID NO: 257).

[0208] In certain embodiments, a nucleic acid comprising a Gar1 promoter described herein further comprises a terminator sequence. In certain embodiments, the terminator sequence comprises one of the terminator sequences in TABLE 17.

TABLE 17

| | |
|---|---|
| a synthetic poly(A) | AATAAAATATCTTTATTTTCATTACATCTGTGTGTTGGTTTTTT |
| sequence (SPA) | GTGTG (SEQ ID NO: 258) |
| SPA and Pause | AATAAAATATCTTTATTTTCATTACATCTGTGTGTTGGTTTTTT |
| | GTGTGAATCGATAGTACTAACATACGCTCTCCATCAAAACAA |
| | AACGAAACAAAACAAACTAGCAAAATAGGCTGTCCCCAGTG |
| | CAAGTGCAGGTGCCAGAACATTTCTCT (SEQ ID NO: 259); |
| SV40 (240 bp) | ATCTAGATAACTGATCATAATCAGCCATACCACATTTGTAGA |
| | GGTTTTACTTGCTTTAAAAAACCTCCCACACCTCCCCCTGAAC |
| | CTGAAACATAAAATGAATGCAATTGTTGTTGTTAACTTGTTTA |
| | TTGCAGCTTATAATGGTTACAAATAAAGCAATAGCATCACAA |
| | ATTTCACAAATAAAGCATTTTTTTCACTGCATTCTAGTTGTGG |
| | TTTGTCCAAACTCATCAATGTATCTTA (SEQ ID NO: 260) |
| SV 40-mini | TTGTTTATTGCAGCTTATAATGGTTACAAATAAAGCAATAGC |
| (120 bp) | ATCACAAATTTCACAAATAAAGCATTTTTTTCACTGCATTCTA |
| | GTTGTGGTTTGTCCAAACTCATCAATGTATCTTAT (SEQ ID |
| | NO: 261) |
| bGH poly A | CGACTGTGCCTTCTAGTTGCCAGCCATCTGTTGTTTGCCCCTC |
| | CCCCGTGCCTTCCTTGACCCTGGAAGGTGCCACTCCCACTGTC |
| | CTTTCCTAATAAAATGAGGAAATTGCATCGCATTGTCTGAGT |
| | AGGTGTCATTCTATTCTGGGGGGTGGGGTGGGGCAGGACAGC |
| | AAGGGGGAGGATTGGGAAGACAATAGCAGGCATGCTGGGGA |
| | TGCGGTGGGCTCTATGG (SEQ ID NO: 262) |
| TKpoly A | GGGGGAGGCTAACTGAAACACGGAAGGAGACAATACCGGAA |
| | GGAACCCGCGCTATGACGGCAATAAAAAGACAGAATAAAAC |
| | GCACGGGTGTTGGGTCGTTTGTTCATAAACGCGGGGTTCGGT |
| | CCCAGGGCTGGCACTCTGTCGATACCCCACCGAGACCCCATT |
| | GGGGCCAATACGCCCGCGTTTCTTCCTTTTCCCCACCCCACCC |
| | CCCAAGTTCGGGTGAAGGCCCAGGGCTCGCAGCCAACGTCG |
| | GGGCGGCAGGCCCTGCCATAG (SEQ ID NO: 263) |
| sNRP1 | GGTATCAAATAAAATACGAAATGTGACAGATT (SEQ ID NO: |
| | 264) |
| sNRP1a | AAATAAAATACGAAATGTGACAGATT (SEQ ID NO: 265) |
| Histone H4B | GGTTGCTGATTTCTCCACAGCTTGCATTTCTGAACCAAAGGCC |
| | CTTTTCAGGGCCGCCCAACTAAACAAAAGAAGAGCTGTATCC |
| | ATTAAGTCAAGAAGC (SEQ ID NO: 266) |
| MALAT-1 | GATTCGTCAGTAGGGTTGTAAAGGTTTTTCTTTTCCTGAGAAA |
| | ACAACCTTTTGTTTTCTCAGGTTTTGCTTTTTGGCCTTTCCCTA |
| | GCTTTAAAAAAAAAAAAGCAAAAGACGCTGGTGGCTGGCAC |
| | TCCTGGTTTCCAGGACGGGGTTCAAGTCCCTGCGGTGTCTTTG |
| | CTT (SEQ ID NO: 267) |
| MALAT-comp14 | AAAGGTTTTTCTTTTCCTGAGAAATTTCTCAGGTTTTGCTTTTT |
| | AAAAAAAAAGCAAAAGACGCTGGTGGCTGGCACTCCTGGTT |
| | TCCAGGACGGGGTTCAAGTCCCTGCGGTGTCTTTGCTT (SEQ |
| | ID NO: 268) |

[0209] In certain embodiments, the Gar1 promoter is coupled with a viral intron (e.g., an SV40i intron, a MVM intron, a Mv2 intron, an HNRNPH1 intron, chimeric introns or synthetic introns).

[0210] In certain embodiments, the Gar1 promoter does not comprise a viral promoter and/or a synthetic promoter. In certain embodiments, the compact promoter does not comprise F5tg83.

[0211] In certain embodiments, the Gar1 promoter comprises at least 95%, 98%, 99%, 99.5% or 100% identity to a naturally-occurring mammalian promoter. In certain embodiments, the compact promoter comprises at least 95%, 98%, 99%, 99.5% or 100% identity to a naturally-occurring human promoter.

[0212] The expression level of a Gar1 promoter can be determined by expressing a reporter molecule in a cell, e.g., a human embryonic kidney (HEK) cell line or an N2A cell line. In certain embodiments, the compact promoter is capable of expressing a luciferase reporter at a higher level than is a HSK thymidine kinase (TK) promoter.

### Other Bidirectional Promoters

[0213] Using the custom perl script described above, additional bidirectional promoters were identified that can be used according to the methods described herein. In certain embodiments, the promoter is a bidirectional promoter comprising a nucleotide sequence having at least 85%, 90%, 95%, 96%, 97%, 98%, 99%, or 100% identity of any one of SEQ ID NOs: 204-255 or a codon-optimized variant and/or fragment thereof. In some embodiments, the bidirectional promoter comprises the nucleotide sequence of any one of SEQ ID NOs: 204-255 or a codon-optimized variant and/or fragment thereof.

[0214] In certain embodiments, a functional fragment comprises a truncation of from about 10 bases to about 70 bases at the 5′ end, the 3′ end, or both the 5′ and 3′ ends of any one of SEQ ID NOs: 204-255 or a variant thereof (e.g., a variant having at least 85%, 90%, 95%, 96%, 97%, 98%, 99%, or 100% identity to any one of SEQ ID NOs: 204-255). In certain embodiments, a functional fragment comprises a truncation of about 10 bases at the 5′ end, the 3′ end, or both the 5′ and 3′ ends of any one of SEQ ID NOs: 204-255 or a variant thereof (e.g., a variant having at least 85%, 90%, 95%, 96%, 97%, 98%, 99%, or 100% identity to any one of SEQ ID NOs: 204-255). In certain embodiments, a functional fragment comprises a truncation of about 20 bases at the 5′ end, the 3′ end, or both the 5′ and 3′ ends of any one of SEQ ID NOs: 204-255 or a variant thereof (e.g., a variant having at least 85%, 90%, 95%, 96%, 97%, 98%, 99%, or 100% identity to any one of SEQ ID NOs: 204-255). In certain embodiments, a functional fragment comprises a truncation of about 30 bases at the 5′ end, the 3′ end, or both the 5′ and 3′ ends of any one of SEQ ID NOs: 204-255 or a variant thereof (e.g., a variant having at least 85%, 90%, 95%, 96%, 97%, 98%, 99%, or 100% identity to any one of SEQ ID NOs: 204-255). In certain embodiments, a functional fragment comprises a truncation of about 40 bases at the 5′ end, the 3′ end, or both the 5′ and 3′ ends of any one of SEQ ID NOs: 204-255 or a variant thereof (e.g., a variant having at least 85%, 90%, 95%, 96%, 97%, 98%, 99%, or 100% identity to any one of SEQ ID NOs: 204-255). In certain embodiments, a functional fragment comprises a truncation of about 50 bases at the 5′ end, the 3′ end, or both the 5′ and 3′ ends of any one of SEQ ID NOs: 204-255 or a variant thereof (e.g., a variant having at least 85%, 90%, 95%, 96%, 97%, 98%, 99%, or 100% identity to any one of SEQ ID NOs: 204-255). In certain embodiments, a functional fragment comprises a truncation of about 60 bases at the 5′ end, the 3′ end, or both the 5′ and 3′ ends of any one of SEQ ID NOs: 204-255 or a variant thereof (e.g., a variant having at least 85%, 90%, 95%, 96%, 97%, 98%, 99%, or 100% identity to any one of SEQ ID NOs: 204-255). In certain embodiments, a functional fragment comprises a truncation of about 70 bases at the 5′ end, the 3′ end, or both the 5′ and 3′ ends of any one of SEQ ID NOs: 204-255 or a variant thereof (e.g., a variant having at least 85%, 90%, 95%, 96%, 97%, 98%, 99%, or 100% identity to any one of SEQ ID NOs: 204-255).

[0215] In certain embodiments, the functional fragment comprise at least a transcription factor binding site. Identification of transcription factor binding sites can be determined by consensus, or by using a differential distance matrix or multidimensional scaling (De Bleser P. et al. (2007) Genome Biol 8(5):R83.

[0216] In certain embodiments, the promoter comprises a TATA mutation. In certain embodiments, the TATA mutation is a TATAA→TCGAA mutation.

[0217] In certain embodiments, the promoter is not one or more of SEQ ID NO: 241-SEQ ID NO: 255.

[0218] In certain embodiments, a nucleic acid comprising a bidirectional promoter described herein further comprises a 5′UTR including at least a portion of a beta-globin 5′UTR sequence or a Kozak sequence. In certain embodiments, the 5′UTR includes the nucleotide sequence 5′-GCCGCCACC-3′ (SEQ ID NO: 256), or a 6 bp, a 7 bp, or an 8 bp fragment thereof. In certain embodiments, the 6 bp fragment is 5′-GCCACC-3′ (SEQ ID NO: 257).

[0219] In certain embodiments, a nucleic acid comprising a bidirectional promoter described herein further comprises a terminator sequence. In certain embodiments, the terminator sequence comprises one of the terminator sequences in TABLE 18.

TABLE 18

| | |
|---|---|
| a synthetic poly(A) | AATAAAATATCTTTATTTTCATTACATCTGTGTGTTGGTTTTTT |
| sequence (SPA) | GTGTG (SEQ ID NO: 258) |
| SPA and Pause | AATAAAATATCTTTATTTTCATTACATCTGTGTGTTGGTTTTTT |
| | GTGTGAATCGATAGTACTAACATACGCTCTCCATCAAAACAA |
| | AACGAAACAAAACAAACTAGCAAAATAGGCTGTCCCCAGTG |
| | CAAGTGCAGGTGCCAGAACATTTCTCT (SEQ ID NO: 259); |
| SV40 (240 bp) | ATCTAGATAACTGATCATAATCAGCCATACCACATTTGTAGA |
| | GGTTTTACTTGCTTTAAAAAACCTCCCACACCTCCCCCTGAAC |
| | CTGAAACATAAAATGAATGCAATTGTTGTTGTTAACTTGTTTA |
| | TTGCAGCTTATAATGGTTACAAATAAAGCAATAGCATCACAA |
| | ATTTCACAAATAAAGCATTTTTTTCACTGCATTCTAGTTGTGG |
| | TTTGTCCAAACTCATCAATGTATCTTA (SEQ ID NO: 260) |
| SV 40-mini | TTGTTTATTGCAGCTTATAATGGTTACAAATAAAGCAATAGC |
| (120 bp) | ATCACAAATTTCACAAATAAAGCATTTTTTTCACTGCATTCTA |
| | GTTGTGGTTTGTCCAAACTCATCAATGTATCTTAT (SEQ ID |
| | NO: 261) |
| bGH poly A | CGACTGTGCCTTCTAGTTGCCAGCCATCTGTTGTTTGCCCCTC |
| | CCCCGTGCCTTCCTTGACCCTGGAAGGTGCCACTCCCACTGTC |
| | CTTTCCTAATAAAATGAGGAAATTGCATCGCATTGTCTGAGT |
| | AGGTGTCATTCTATTCTGGGGGGTGGGGTGGGGCAGGACAGC |
| | AAGGGGGAGGATTGGGAAGACAATAGCAGGCATGCTGGGGA |
| | TGCGGTGGGCTCTATGG (SEQ ID NO: 262) |
| TKpoly A | GGGGGAGGCTAACTGAAACACGGAAGGAGACAATACCGGAA |
| | GGAACCCGCGCTATGACGGCAATAAAAAGACAGAATAAAAC |
| | GCACGGGTGTTGGGTCGTTTGTTCATAAACGCGGGGTTCGGT |
| | CCCAGGGCTGGCACTCTGTCGATACCCCACCGAGACCCCATT |
| | GGGGCCAATACGCCCGCGTTTCTTCCTTTTCCCCACCCCACCC |
| | CCCAAGTTCGGGTGAAGGCCCAGGGCTCGCAGCCAACGTCG |
| | GGGCGGCAGGCCCTGCCATAG (SEQ ID NO: 263) |
| sNRP1 | GGTATCAAATAAAATACGAAATGTGACAGATT (SEQ ID NO: |
| | 264) |
| SNRP1a | AAATAAAATACGAAATGTGACAGATT (SEQ ID NO: 265) |
| Histone H4B | GGTTGCTGATTTCTCCACAGCTTGCATTTCTGAACCAAAGGCC |
| | CTTTTCAGGGCCGCCCAACTAAACAAAAGAAGAGCTGTATCC |
| | ATTAAGTCAAGAAGC (SEQ ID NO: 266) |
| MALAT-1 | GATTCGTCAGTAGGGTTGTAAAGGTTTTTCTTTTCCTGAGAAA |
| | ACAACCTTTTGTTTTCTCAGGTTTTGCTTTTTGGCCTTTCCCTA |
| | GCTTTAAAAAAAAAAAAGCAAAAGACGCTGGTGGCTGGCAC |
| | TCCTGGTTTCCAGGACGGGGTTCAAGTCCCTGCGGTGTCTTTG |
| | CTT (SEQ ID NO: 267) |
| MALAT-comp14 | AAAGGTTTTTCTTTTCCTGAGAAATTTCTCAGGTTTTGCTTTTT |
| | AAAAAAAAAGCAAAAGACGCTGGTGGCTGGCACTCCTGGTT |
| | TCCAGGACGGGGTTCAAGTCCCTGCGGTGTCTTTGCTT (SEQ |
| | ID NO: 268) |

[0220] In certain embodiments, the bidirectional promoter is coupled with a viral intron (e.g., an SV40i intron, a MVM intron, a Mv2 intron, an HNRNPH1 intron, chimeric introns or synthetic introns).

[0221] In certain embodiments, the bidirectional promoter does not comprise a viral promoter and/or a synthetic promoter. In certain embodiments, the compact promoter does not comprise F5tg83.

[0222] In certain embodiments, the bidirectional promoter comprises at least 95%, 98%, 99%, 99.5% or 100% identity to a naturally-occurring mammalian promoter. In certain embodiments, the compact promoter comprises at least 95%, 98%, 99%, 99.5% or 100% identity to a naturally-occurring human promoter.

[0223] The expression level of a bidirectional promoter can be determined by expressing a reporter molecule in a cell, e.g., a human embryonic kidney (HEK) cell line or an N2A cell line. In certain embodiments, the compact promoter is capable of expressing a luciferase reporter at a higher level than is a HSK thymidine kinase (TK) promoter.

### III. Genes, Expression Constructs, and Expression Vectors

[0224] A coding sequence of a gene (e.g. CFTR, ATP7B, ATP7A, AGL, DMD and CPS1), or a functional fragment or variant thereof, may be provided in an expression construct and the construct itself may be provided as a transgene in the recombinant AAV (rAAV) vectors of the disclosure. The transgene is a nucleic acid sequence, heterologous to the vector sequences flanking the transgene, which encodes a polypeptide, protein, or other product, of interest. The nucleic acid coding sequence is operatively linked to regulatory components in a manner which permits transgene transcription, translation, and/or expression in a target cell. The heterologous nucleic acid sequence (transgene) can be derived from any organism. In certain embodiments, the transgene is derived from a human.

[0225] In certain embodiments, the coding sequence is expressed in a target cell. In certain embodiments, the target cell is a lung cell, a pancreatic cell, a liver cell, or a neuronal cell.

[0226] In certain embodiments, the coding sequence is between about 4110 bp and about 6000 bp. In certain embodiments, the coding sequence is between about 4110 bp and about 5000 bp. In certain embodiments, the coding sequence is between about 4110 bp and about 5500 bp. In certain embodiments, the coding sequence is between about 4200 bp and about 5000 bp. In certain embodiments, the coding sequence is between about 4200 bp and about 5500 bp. In certain embodiments, the coding sequence is between about 4200 bp and about 6000 bp. In certain embodiments, the coding sequence is between about 4300 bp and about 5000 bp. In certain embodiments, the coding sequence is between about 4300 bp and about 5500 bp. In certain embodiments, the coding sequence is between about 4300 bp and about 6000 bp. In certain embodiments, the coding sequence is between about 4500 bp and about 5000 bp. In certain embodiments, the coding sequence is between about 4500 bp and about 5500 bp. In certain embodiments, the coding sequence is between about 4500 bp and about 6000 bp. In certain embodiments, the coding sequence is between about 4600 bp and about 5000 bp. In certain embodiments, the coding sequence is between about 4600 bp and about 5500 bp. In certain embodiments, the coding sequence is between about 4600 bp and about 6000 bp. In certain embodiments, the coding sequence is between about 4700 bp and about 5000 bp. In certain embodiments, the coding sequence is between about 4700 bp and about 5500 bp. In certain embodiments, the coding sequence is between about 4700 bp and about 6000 bp.

[0227] In some embodiments, in addition to a large gene or a functional fragment or variant thereof, the rAAV vector may also encode additional proteins, peptides, RNA, enzymes, or catalytic RNAs. Desirable RNA molecules include shRNA, tRNA, dsRNA, ribosomal RNA, catalytic RNAs, and antisense RNAs. One example of a useful RNA sequence is a sequence which extinguishes expression of a targeted nucleic acid sequence in the treated subject. The additional proteins, peptides, RNA, enzymes, or catalytic RNAs and the complement factor may be encoded by a single vector carrying two or more heterologous sequences, or using two or more rAAV vectors each carrying one or more heterologous sequences.

### Cystic Fibrosis Transmembrane Conductance Regulator (CFTR)

[0228] In certain aspects, the disclosure provides nucleic acid comprising a coding sequence of a gene (e.g., a transgene, optionally in a recombinant adeno-associated viral (rAAV) vector) wherein the coding sequence encodes a human Cystic Fibrosis Transmembrane Conductance Regulator (CFTR) protein or biologically active fragment thereof. In certain embodiments, the coding sequence comprises a nucleotide sequence that is at least 80%, 85%, 90%, 92%, 94%, 95%, 97%, 99% or 100% identical to any of the sequences disclosed herein encoding a CFTR protein, or biologically active fragments thereof. In certain embodiments, the coding sequence comprises a nucleotide sequence that is at least 80%, 85%, 90%, 92%, 94%, 95%, 97%, 99% or 100% identical to any of SEQ ID NOs: 1-14, or biologically active fragments thereof. In certain embodiments, the coding sequence comprises a nucleotide sequence that encodes SEQ ID NO: 926, a sequence that is at least 80%, 85%, 90%, 92%, 94%, 95%, 97%, or 99% identical thereto, or biologically active fragments of any of the foregoing.

[0229] In certain aspects, the disclosure relates to a codon-optimized CFTR coding sequence. The codon-optimized CFTR coding sequence can include one or more of the following features as compared to a wild type CFTR coding sequence: (a) fewer unpaired base pairs of mRNA; (b) increased codon usage bias; (c) decreased GC content; (d) fewer CpG dinucleotides; (e) increased mRNA secondary structure; (f) fewer cryptic splicing sites; (g) fewer premature poly(A) sites; (h) fewer RNA instability motifs; (i) fewer AT-rich elements (ARE); (j) fewer repeat sequences (e.g., direct repeat, reverse repeat, and dyad repeat); (k) fewer GC peaks; and (1) fewer cis-acting elements. Accordingly, in certain embodiments, an optimized CFTR coding sequence comprises at least 1, at least 2, at least 3, at least 4, at least 5, at least 6, at least 7, at least 8, or at least 9 fewer unpaired base pairs of mRNA, CpG dinucleotides, cryptic splicing sites, premature poly(A) sites, RNA instability motifs; AT-rich elements (ARE), repeat sequences (e.g., direct repeat, reverse repeat, and dyad repeat), GC peaks, and cis-acting elements.

[0230] In certain embodiments, base-pairing among the first 10 residues of an optimized CFTR coding sequence will be minimized, because such base-pairing is known to affect translation. In certain embodiments, the first 10 residues of an optimized CFTR coding sequence, when tested (e.g., computationally tested) for secondary structure, will exhibit at least 1, at least 2, at least 3, at least 4, at least 5, at least 6, at least 7, at least 8, or at least 9 fewer base-pairings (e.g., base pairings with another nucleotide in the optimized CFTR) as compared to a wild-type CFTR coding sequence.

[0231] In certain embodiments, model unstructured UTRs (such as human β-globin 5′UTR and rabbit β-globin 3′UTR) can be added to flank a CFTR coding sequence and compared to an optimized CFTR sequence having the model unstructured UTRs and computationally refolded to confirm the absence of extensive base-pairing occurring between each optimized sequence and the model UTRs. Computational folding programs are known in the art, including, but not limited to, RNAfold (available at URL: rna.tbi.univie.ac.at/cgi-bin/RNAWebSuite/RNAfold.cgi), RNAstructure (available at URL: ma.urmc.rochester.edu/RNAstructureWeb/Servers/Predict1/Predict1.html); CONTRAfold (available at URL: contra.stanford.edu/contrafold/server.html); Mfold (available at URL: unafold.rna.albany.edu/?q=mfold); CentroidFold (available at URL: www.ncma.org/softwares/); LinearFold (available at URL: linearfold.org/). In certain embodiments, the minimum free energy structure of the nucleic acid comprising the 3′UTR, the 5′UTR or the 3′UTR and the 5′UTR does not favor base-pairing between (a) the 3′UTR, the 5′UTR or the 3′UTR and the 5′UTR and (b) the CFTR coding sequence.

[0232] A CFTR coding sequence can be optimized using the codon adaptive index (CAI). In certain embodiments, an optimized CFTR coding sequence has a CAI score of greater than 0.70, for example, between about 0.70 and about 0.90. In certain embodiments, an optimized CFTR coding sequence has a frequency of optimal codons (FOP) of greater than 80%, for example, from about 80% to about 90%. In certain embodiments, an optimized CFTR coding sequence has a GC content of between about 30-70%, for example, from about 30% to about 40%, about 30% to about 50%, from about 30% to about 60%, from about 40% to about 50%, from about 40% to about 60%, or from about 40% to about 70%. Unfavorable GC peaks are optimized to prolong the half-life of the mRNA.

[0233] A CFTR coding sequence can be optimized by removing cis-acting elements, including splice donors/acceptors (GGTAAG, GGTGAT, GTAAAA, GTAAGT), PolyA (AATAAA, ATTAAA, AAAAAAA), destabilizing motifs (ATTTA), AT-rich elements (ATTTTA, ATTTTTA, ATTTTTTA), PolyT (TTTTTT), polymerase slippage sites (GGGGGG, CCCCCC), and internal Kozak sequences (ACCACCATGG, GCCACCATGG). In certain embodiments, an optimized CFTR coding sequence comprises at least 1, at least 2, at least 3, at least 4, at least 5, at least 6, at least 7, at least 8, or at least 9 fewer cis-acting elements as compared to a wild-type CFTR coding sequence.

[0234] Stem loop structures and antiviral motifs (TGTGT, AACGTT, CGTTCG, AGCGCT, GACGTC, GACGTT) can interfere with ribosomal biding and mRNA stability. Accordingly, in certain embodiments, a CFTR coding sequence comprises at least 1, at least 2, at least 3, at least 4, at least 5, at least 6, at least 7, at least 8, or at least 9 fewer stem loop structures or antiviral motifs as compared to a wild-type CFTR coding sequence.

[0235] In certain embodiments, the calculated free energy (ΔG) of the codon optimized CFTR coding sequence is less than that of a wild-type CFTR coding sequence. In certain embodiments, the calculated free energy (ΔG) of the codon optimized CFTR coding sequence is about 300 kcal/mol to about 2000 kcal/mol less than that of a wild-type CFTR coding sequence.

[0236] In certain embodiments, the codon optimized CFTR coding sequence comprises fewer unpaired bases than a corresponding wild-type CFTR sequence. In certain embodiments, the codon optimized CFTR coding sequence comprises between about 15% and about 30% unpaired bases, between about 15% and about 25%, between about 17% and about 22% unpaired bases as predicted by LinearFold (http://linearfold.org/). In certain embodiments, the codon optimized CFTR coding sequence comprises between about 45% and about 85% the number of unpaired bases of a corresponding wild-type CFTR sequence, for example, from about 45% to about 80%, about 45% to about 75%, about 45% to about 70%, about 45% to about 65%, about 45% to about 60%, about 45% to about 55%, about 45% to about 50%, about 50% to about 85%, about 50% to about 80%, about 50% to about 75%, about 50% to about 70%, about 50% to about 65%, about 50% to about 60%, about 50% to about 55%, about 55% to about 85%, about 55% to about 80%, about 55% to about 75%, about 55% to about 70%, about 55% to about 65%, about 55% to about 60%, about 60% to about 85%, about 60% to about 80%, about 60% to about 75%, about 60% to about 70%, about 60% to about 65%, about 65% to about 85%, about 65% to about 80%, about 65% to about 75%, about 65% to about 70%, about 70% to about 85%, about 70% to about 80%, about 70% to about 75%, or about 75% to about 80 the number of unpaired bases of a corresponding wild-type CFTR sequence as predicted by an RNA folding prediction program (e.g., RNAfold, RNAstructure, CONTRAfold, Mfold, CentroidFold and LinearFold as described herein).

[0237] In order to assess the effects of optimization on mRNA stability, the half-life of a CFTR coding sequence can be determined by RT-qPCR following actinomycin treatment. The assay can be performed in A549 cells, which do not endogenously express CFTR. A primer pair and probes against the rabbit β-globin 3′UTR can be used to standardize detection between all constructs (see, e.g., FIG. 20). RT priming occurs via an oligo(dT) primer, and qPCR detection in the 3′UTR region can avoid potential issues arising from extensive RNA secondary structures within the coding sequences. Cells can be cultured and transfected with plasmids encoding the optimized CFTR coding sequences. Cells can be treated with a transcription arresting agent such as actinomycin D or DMSO at varying time points to arrest transcription. At each time point, cells are lysed, RNA is quantitated, and cDNA is synthesized. Expression and stability of each variant can be compared to the wild-type CFTR coding sequence. In addition, the effects of optimization on protein levels can be assessed by performing Western Blots on the transformed cells using antibodies against CFTR (e.g., ab596, CFF Antibody Distribution Program) and β-actin. In addition, the effects of codon optimization on AAV packaging can be assessed by small-scale packaging experiments. Detailed protocols for these assessments are found in the Examples.

[0238] In certain aspects, the disclosure provides a nucleic acid comprising a codon-optimized CFTR coding sequence or biologically active fragment thereof. In certain embodiments, the coding sequence comprises a nucleotide sequence of SEQ ID NOs: 3-14. In certain embodiments, the coding sequence comprises a nucleotide sequence that is at least 80%, 85%, 90%, 92%, 94%, 95%, 97%, 99% or 100% identical to any of SEQ ID NOs: 3-14, or biologically active fragments thereof. In certain embodiments, the coding sequence comprises a nucleotide sequence that encodes SEQ ID NO: 926, a sequence that is at least 80%, 85%, 90%, 92%, 94%, 95%, 97%, or 99% identical thereto, or biologically active fragments of any of the foregoing.

### Copper-Transporting P-Type ATPase (ATP7B and ATP7A)

[0239] In certain aspects, the disclosure provides a nucleic acid comprising a coding sequence of a gene (e.g., a transgene, optionally in a recombinant adeno-associated viral (rAAV) vector), wherein the coding sequence encodes a human copper-transporting P-type ATPase protein or biologically active fragment thereof. In certain embodiments, the coding sequence comprises a nucleotide sequence that is at least 80%, 85%, 90%, 92%, 94%, 95%, 97%, 99% or 100% identical to any of the sequences disclosed herein encoding a ATP7B protein, or biologically active fragments thereof. In certain embodiments, the coding sequence comprises a nucleotide sequence that is at least 80%, 85%, 90%, 92%, 94%, 95%, 97%, 99% or 100% identical to any of SEQ ID NO: 15, or biologically active fragments thereof. In certain embodiments, the coding sequence comprises a nucleotide sequence that encodes SEQ ID NO: 927, a sequence that is at least 80%, 85%, 90%, 92%, 94%, 95%, 97%, or 99% identical thereto, or biologically active fragments of any of the foregoing.

[0240] In certain aspects, the disclosure provides a nucleic acid comprising a coding sequence of a gene (e.g., a transgene, optionally in a recombinant adeno-associated viral (rAAV) vector) wherein the coding sequence encodes a human copper-transporting P-type ATPase protein or biologically active fragment thereof. In certain embodiments, the coding sequence comprises a nucleotide sequence that is at least 80%, 85%, 90%, 92%, 94%, 95%, 97%, 99% or 100% identical to any of the sequences disclosed herein encoding a ATP7A protein, or biologically active fragments thereof. In certain embodiments, the coding sequence comprises a nucleotide sequence that is at least 80%, 85%, 90%, 92%, 94%, 95%, 97%, 99% or 100% identical to any of SEQ ID NO: 16, or biologically active fragments thereof. In certain embodiments, the coding sequence comprises a nucleotide sequence that encodes SEQ ID NO: 928, a sequence that is at least 80%, 85%, 90%, 92%, 94%, 95%, 97%, or 99% identical thereto, or biologically active fragments of any of the foregoing.

### Amylo-Alpha-1, 6-Glucosidase, 4-Alpha-Glucanotransferase (AGL)

[0241] In certain aspects, the disclosure provides a nucleic acid comprising a coding sequence of a gene (e.g., a transgene, optionally in a recombinant adeno-associated viral (rAAV) vector) wherein the coding sequence encodes a human Amylo-Alpha-1, 6-Glucosidase, 4-Alpha-Glucanotransferase (AGL) protein or biologically active fragment thereof. In certain embodiments, the coding sequence comprises a nucleotide sequence that is at least 80%, 85%, 90%, 92%, 94%, 95%, 97%, 99% or 100% identical to any of the sequences disclosed herein encoding a AGL protein, or biologically active fragments thereof. In certain embodiments, the coding sequence comprises a nucleotide sequence that is at least 80%, 85%, 90%, 92%, 94%, 95%, 97%, 99% or 100% identical to any of SEQ ID NO: 17, or biologically active fragments thereof. In certain embodiments, the coding sequence comprises a nucleotide sequence that encodes SEQ ID NO: 929, a sequence that is at least 80%, 85%, 90%, 92%, 94%, 95%, 97%, or 99% identical thereto, or biologically active fragments of any of the foregoing.

### Duchenne Muscular Dystrophy (DMD)

[0242] In certain aspects, the disclosure provides a nucleic acid comprising a coding sequence of a gene (e.g., a transgene, optionally in a recombinant adeno-associated viral (rAAV) vector) wherein the coding sequence encodes a human dystrophin (DMD) protein or biologically active fragment thereof. Exemplary biologically active fragments of DMD include minidystrophin and microdystrophin, and those biologically active fragments disclosed in U.S. Pat. No. 10,351,611. In certain embodiments, the coding sequence comprises a nucleotide sequence that is at least 80%, 85%, 90%, 92%, 94%, 95%, 97%, 99% or 100% identical to any of the sequences disclosed herein encoding a DMD protein, or biologically active fragments thereof. In certain embodiments, the coding sequence comprises a nucleotide sequence that is at least 80%, 85%, 90%, 92%, 94%, 95%, 97%, 99% or 100% identical to SEQ ID NO: 18, or biologically active fragments thereof.

### Carbamoyl Phosphate Synthetase I (CPS1)

[0243] In certain aspects, the disclosure provides a nucleic acid (e.g., a transgene, optionally in a recombinant adeno-associated viral (rAAV) vector) encoding a human carbamoyl phosphate synthetase I (CPS1) protein or biologically active fragment thereof. In certain embodiments, the nucleic acid sequence is at least 80%, 85%, 90%, 92%, 94%, 95%, 97%, 99% or 100% identical to any of the sequences disclosed herein encoding a CPS1 protein, or biologically active fragments thereof. In certain embodiments, the nucleic acid sequence is at least 80%, 85%, 90%, 92%, 94%, 95%, 97%, 99% or 100% identical to any of SEQ ID NO: 19-24, or biologically active fragments thereof. In certain embodiments, the coding sequence comprises a nucleotide sequence that encodes any one of SEQ ID NOs: 930-935, a sequence that is at least 80%, 85%, 90%, 92%, 94%, 95%, 97%, or 99% identical thereto, or biologically active fragments of any of the foregoing.

[0244] In one aspect, a transgene comprises a large gene or a functional fragment or variant thereof that encodes a polypeptide with 1, 2, 3, 4, 5, 6, 7, 8, 9, 10, 11, 12, 13, 14, or 15 amino acid substitutions, deletions, and/or additions relative to the wild-type polypeptide. In some embodiments, a transgene encodes a complement system polypeptide with 1, 2, 3, 4, or 5 amino acid deletions relative to the wild-type polypeptide. In some embodiments, a transgene encodes a polypeptide with 1, 2, 3, 4, or 5 amino acid substitutions relative to the wild-type polypeptide. In some embodiments, a transgene encodes a polypeptide with 1, 2, 3, 4, or 5 amino acid insertions relative to the wild-type polypeptide. Polynucleotides complementary to any of the polynucleotide sequences disclosed herein are also encompassed by the present disclosure. Polynucleotides may be single-stranded (coding or antisense) or double-stranded, and may be DNA (genomic or synthetic), cDNA, or RNA molecules. RNA molecules include mRNA molecules. Additional coding or non-coding sequences may, but need not, be present within a polynucleotide of the present disclosure, and a polynucleotide may, but need not, be linked to other molecules and/or support materials.

[0245] Two polynucleotide or polypeptide sequences are said to be “identical” if the sequence of nucleotides or amino acids in the two sequences is the same when aligned for maximum correspondence as described below. Comparisons between two sequences are typically performed by comparing the sequences over a comparison window to identify and compare local regions of sequence similarity. A “comparison window” as used herein, refers to a segment of at least about 20 contiguous positions, usually 30 to about 75, or 40 to about 50, in which a sequence may be compared to a reference sequence of the same number of contiguous positions after the two sequences are optimally aligned.

[0246] Optimal alignment of sequences for comparison may be conducted using the MegAlign® program in the Lasergene® suite of bioinformatics software (DNASTAR®, Inc., Madison, WI), using default parameters. This program embodies several alignment schemes described in the following references: Dayhoff, M. O., 1978, A model of evolutionary change in proteins—Matrices for detecting distant relationships. In Dayhoff, M. O. (ed.) Atlas of Protein Sequence and Structure, National Biomedical Research Foundation, Washington DC Vol. 5, Suppl. 3, pp. 345-358; Hein J., 1990, Unified Approach to Alignment and Phylogenes pp. 626-645 Methods in Enzymology vol. 183, Academic Press, Inc., San Diego, CA; Higgins et al. (1989) CABIOS 5: 151-153; Myers et al. (1988) CABIOS 4: 11-17; Robinson, E. D., 1971, Comb. Theor. 11: 105; Santou et al (1987), MOL. BIOL. EVOL. 4:406-425; Sneath, P. H. A. and Sokal, R. R., 1973, Numerical Taxonomy the Principles and Practice of Numerical Taxonomy, Freeman Press, San Francisco, CA; Wilbur, W. J. and Lipman (1983) PROC. NATL. ACAD. SCI. USA 80:726-730.

[0247] Preferably, the “percentage of sequence identity” is determined by comparing two optimally aligned sequences over a window of comparison of at least 20 positions, wherein the portion of the polynucleotide or polypeptide sequence in the comparison window may comprise additions or deletions (i.e., gaps) of 20 percent or less, usually 5 to 15 percent, or 10 to 12 percent, as compared to the reference sequences (which does not comprise additions or deletions) for optimal alignment of the two sequences. The percentage is calculated by determining the number of positions at which the identical nucleic acid bases or amino acid residue occurs in both sequences to yield the number of matched positions, dividing the number of matched positions by the total number of positions in the reference sequence (i.e., the window size) and multiplying the results by 100 to yield the percentage of sequence identity. The transgenes or variants may also, or alternatively, be substantially homologous to a native gene, or a portion or complement thereof. Such polynucleotide variants are capable of hybridizing under moderately stringent conditions to a naturally occurring DNA sequence encoding a complement factor (or a complementary sequence). Suitable “moderately stringent conditions” include prewashing in a solution of 5×SSC, 0.5% SDS, 1.0 mM EDTA (pH 8.0); hybridizing at 50° C.-65° C., 5×SSC, overnight; followed by washing twice at 65° C. for 20 minutes with each of 2×, 0.5× and 0.2×SSC containing 0.1% SDS. As used herein, “highly stringent conditions” or “high stringency conditions” are those that: (1) employ low ionic strength and high temperature for washing, for example 0.015 M sodium chloride/0.0015 M sodium citrate/0.1% sodium dodecyl sulfate at 50° C.; (2) employ during hybridization a denaturing agent, such as formamide, for example, 50% (v/v) formamide with 0.1% bovine serum albumin/0.1% Ficoll/0.1% polyvinylpyrrolidone/50 mM sodium phosphate buffer at pH 6.5 with 750 mM sodium chloride, 75 mM sodium citrate at 42° C.; or (3) employ 50% formamide, 5×SSC (0.75 M NaCl, 0.075 M sodium citrate), 50 mM sodium phosphate (pH 6.8), 0.1% sodium pyrophosphate, 5×Denhardt's solution, sonicated salmon sperm DNA (50 μg/ml), 0.1% SDS, and 10% dextran sulfate at 42° C., with washes at 42° C. in 0.2×SSC (sodium chloride/sodium citrate) and 50% formamide at 55° C., followed by a high-stringency wash consisting of 0.1×SSC containing EDTA at 55° C. The skilled artisan will recognize how to adjust the temperature, ionic strength, etc. as necessary to accommodate factors such as probe length and the like.

[0248] It will be appreciated by those of ordinary skill in the art that, as a result of the degeneracy of the genetic code, there are many nucleotide sequences that encode a polypeptide as described herein. Some of these polynucleotides bear minimal homology to the nucleotide sequence of any native gene. Nonetheless, polynucleotides that vary due to differences in codon usage are specifically contemplated by the present disclosure. Further, alleles of the genes comprising the polynucleotide sequences provided herein are within the scope of the present disclosure. Alleles are endogenous genes that are altered as a result of one or more mutations, such as deletions, additions and/or substitutions of nucleotides. The resulting mRNA and protein may, but need not, have an altered structure or function. Alleles may be identified using standard techniques (such as hybridization, amplification and/or database sequence comparison).

[0249] The nucleic acids/polynucleotides of this disclosure can be obtained using chemical synthesis, recombinant methods, or PCR. Methods of chemical polynucleotide synthesis are well known in the art and need not be described in detail herein. One of skill in the art can use the sequences provided herein and a commercial DNA synthesizer to produce a desired DNA sequence. In other embodiments, nucleic acids of the disclosure also include nucleotide sequences that hybridize under highly stringent conditions to the nucleotide sequences set forth in SEQ ID NOs: 1-24, or sequences complementary thereto. One of ordinary skill in the art will readily understand that appropriate stringency conditions which promote DNA hybridization can be varied. For example, one could perform the hybridization at 6.0× sodium chloride/sodium citrate (SSC) at about 45° C., followed by a wash of 2.0×SSC at 50° C. For example, the salt concentration in the wash step can be selected from a low stringency of about 2.0×SSC at 50° C. to a high stringency of about 0.2×SSC at 50° C. In addition, the temperature in the wash step can be increased from low stringency conditions at room temperature, about 22° C., to high stringency conditions at about 65° C. Both temperature and salt may be varied, or temperature or salt concentration may be held constant while the other variable is changed. In one embodiment, the disclosure provides nucleic acids which hybridize under low stringency conditions of 6×SSC at room temperature followed by a wash at 2×SSC at room temperature.

[0250] Isolated nucleic acids which differ due to degeneracy in the genetic code are also within the scope of the disclosure. For example, a number of amino acids are designated by more than one triplet. Codons that specify the same amino acid, or synonyms (for example, CAU and CAC are synonyms for histidine) may result in “silent” mutations which do not affect the amino acid sequence of the protein. One skilled in the art will appreciate that these variations in one or more nucleotides (up to about 3-5% of the nucleotides) of the nucleic acids encoding a particular protein may exist among members of a given species due to natural allelic variation. Any and all such nucleotide variations and resulting amino acid polymorphisms are within the scope of this disclosure.

[0251] The present disclosure further provides oligonucleotides that hybridize to a polynucleotide having the nucleotide sequence set forth in SEQ ID NOs: 1-24, or to a polynucleotide molecule having a nucleotide sequence which is the complement of a sequence listed above. Such oligonucleotides are at least about 10 nucleotides in length, and preferably from about 15 to about 30 nucleotides in length, and hybridize to one of the aforementioned polynucleotide molecules under highly stringent conditions, i.e., washing in 6>SSC/0.5% sodium pyrophosphate at about 37° C. for about 14-base oligos, at about 48° C. for about 17-base oligos, at about 55° C. for about 20-base oligos, and at about 60° C. for about 23-base oligos. In a preferred embodiment, the oligonucleotides are complementary to a portion of one of the aforementioned polynucleotide molecules. These oligonucleotides are useful for a variety of purposes including encoding or acting as antisense molecules useful in gene regulation, or as primers in amplification of complement system-encoding polynucleotide molecules.

[0252] In another embodiment, the transgenes useful herein include reporter sequences, which upon expression produce a detectable signal. Such reporter sequences include, without limitation, DNA sequences encoding β-lactamase, β-galactosidase (LacZ), alkaline phosphatase, thymidine kinase, green fluorescent protein (GFP), red fluorescent protein (RFP), chloramphenicol acetyltransferase (CAT), luciferase, membrane bound proteins including, for example, CD2, CD4, CD8, the influenza hemagglutinin protein, and others well known in the art, to which high affinity antibodies directed thereto exist or can be produced by conventional means, and fusion proteins comprising a membrane bound protein appropriately fused to an antigen tag domain from, among others, hemagglutinin or Myc. These coding sequences, when associated with regulatory elements which drive their expression, provide signals detectable by conventional means, including enzymatic, radiographic, colorimetric, fluorescence or other spectrographic assays, fluorescent activating cell sorting assays and immunological assays, including enzyme linked immunosorbent assay (ELISA), radioimmunoassay (RIA) and immunohistochemistry. For example, where the marker sequence is the LacZ gene, the presence of the vector carrying the signal is detected by assays for beta-galactosidase activity. Where the transgene is green fluorescent protein or luciferase, the vector carrying the signal may be measured visually by color or light production in a luminometer.

[0253] The large gene (e.g. CFTR, ATP7B, ATP7A, AGL, DMD, and CPS1) or a functional fragment or variant thereof may be used to correct or ameliorate gene deficiencies, which may include deficiencies in which normal large genes are expressed at less than normal levels or deficiencies in which the functional complement system gene product is not expressed. In some embodiments, the transgene sequence encodes a single large gene or a functional fragment or variant thereof. The disclosure further includes using multiple transgenes, e.g., transgenes encoding two or more large genes (e.g. CFTR, ATP7B, ATP7A, AGL, DMD, and CPS1), or a functional fragments or variants thereof. In certain situations, a different transgene may be used to encode different large genes or a functional fragments or variants thereof (e.g. CFTR, ATP7B, ATP7A, AGL, DMD, and CPS1). Alternatively, different large genes (e.g. CFTR, ATP7B, ATP7A, AGL, DMD, and CPS1) or functional fragments or variants thereof, may be encoded by the same transgene.

[0254] The regulatory sequences include conventional control elements which are operably linked to the transgene comprising a large gene (e.g. CFTR, ATP7B, ATP7A, AGL, DMD, and CPS1), or a functional fragment or variant thereof, in a manner which permits its transcription, translation and/or expression in a cell transfected with the vector or infected with the virus produced as described herein. As used herein, “operably linked” sequences include both expression control sequences that are contiguous with the gene of interest and expression control sequences that act in trans or at a distance to control the gene of interest. Expression control sequences include appropriate transcription initiation, termination, promoter and enhancer sequences; efficient RNA processing signals such as splicing and polyadenylation (poly A) signals; sequences that stabilize cytoplasmic mRNA; sequences that enhance translation efficiency (i.e., Kozak consensus sequence); sequences that enhance protein stability; and when desired, sequences that enhance secretion of the encoded product. A great number of expression control sequences, including promoters, are known in the art and may be utilized.

[0255] The regulatory sequences useful in the constructs provided herein may also contain an intron, desirably located between the promoter/enhancer sequence and the gene. One desirable intron sequence is derived from SV-40, and is a 100 bp mini-intron splice donor/splice acceptor referred to as SD-SA. In some embodiments, the intron comprises the nucleotide sequence of SEQ ID NO: 10, or a codon-optimized or fragment thereof. Another suitable sequence includes the woodchuck hepatitis virus post-transcriptional element. (See, e.g., L. Wang and I. Verma, 1999 PROC. NATL. ACAD. SCI., USA, 96:3906-3910). PolyA signals may be derived from many suitable species, including, without limitation SV-40, human and bovine.

[0256] Another regulatory component of the rAAV useful in the methods described herein is an internal ribosome entry site (IRES). An IRES sequence, or other suitable systems, may be used to produce more than one polypeptide from a single gene transcript. An IRES (or other suitable sequence) is used to produce a protein that contains more than one polypeptide chain or to express two different proteins from or within the same cell. Preferably, the IRES is located 3′ to the transgene in the rAAV vector.

[0257] Other regulatory sequences useful herein include enhancer sequences. Enhancer sequences useful herein include the IRBP enhancer, immediate early cytomegalovirus enhancer, one derived from an immunoglobulin gene or SV40 enhancer, the cis-acting element identified in the mouse proximal promoter, etc.

[0258] Selection of these and other common vector and regulatory elements are conventional and many such sequences are available. See, e.g., Sambrook et al., and references cited therein at, for example, pages 3.18-3.26 and 16.17-16.27 and Ausubel et al., Current Protocols in Molecular Biology, John Wiley & Sons, New York, 1989). It is understood that not all vectors and expression control sequences will function equally well to express all of the transgenes as described herein. However, one of skill in the art may make a selection among these, and other, expression control sequences to generate the rAAV vectors of the disclosure.

[0259] In certain embodiments, the expression construct includes a coding sequence (e.g., a protein coding sequence). In certain embodiments, the expression construct is present in an rAAV vector to target a specific cell type. In certain embodiments, the expression construct is expressed in a target cell (e.g., a lung cell, a pancreatic cell, a liver cell, an epithelial cell, or a neuronal cell). In certain embodiments, the expression construct is expressed in a Calu-3 cells, CFBE4lo− cells, or in A549 cells. In certain embodiments, the expression construct is expressed in HEK293 cells. In certain embodiments, the expression construct is expressed in HeLa cells.

[0260] In certain embodiments, the expression construct includes the coding sequence of a large gene (e.g., CFTR, ATP7B, ATP7A, AGL, DMD, and CPS1). In certain embodiments, expressing CFTR protein in an epithelial cell causes an increase in transepithelial electrical resistance (TEER) as compared to a cell in which the expression construct is not present and/or expressed. In certain embodiments, expressing CFTR protein in an epithelial cell causes an increase in transepithelial Cl⁻ transport as compared to a cell in which the expression construct is not present and/or expressed.

### IV. Nucleic Acids with a Bidirectional Promoter

[0261] In certain embodiments, the expression construct includes a compact bidirectional promoter, a protein coding gene, and, optionally, a second gene comprising a second coding sequence that encodes an RNA molecule or a second protein. In certain embodiments, the compact bidirectional promoter has a size between 50 bp and 250 bp (e.g., from 60 bp to 240 bp, from 70 bp to 230 bp, from 80 bp to 220 bp, from 90 bp to 210 bp, from 100 bp to 200 bp, from 110 bp to 190 bp, from 120 bp to 180 bp, from 130 bp to 170 bp, or from 140 bp to 160 bp). In some embodiments, the compact bidirectional promoter has a size between 50 bp and 200 bp (e.g., from 60 bp to 190 bp, from 70 bp to 180 bp, from 80 bp to 170 bp, from 90 bp to 160 bp, from 100 bp to 150 bp, from 110 bp to 140 bp, or from 120 bp to 130 bp). In some embodiments, the compact bidirectional promoter has a size between 50 bp and 180 bp (from 60 bp to 170 bp, from 70 bp to 160 bp, from 80 bp to 150 bp, from 90 bp to 140 bp, from 100 bp to 130 bp, from 110 bp to 120 bp).

[0262] In certain embodiments, the protein coding gene comprises a large gene as described herein.

[0263] In certain embodiments, the second gene encodes a molecule (e.g., an RNA molecule or a second protein) smaller than the protein encoded by the protein coding gene. In certain embodiments, the second coding sequence encodes a molecule (e.g., an RNA molecule or a second protein) larger than the protein encoded by the protein coding gene. In certain embodiments, the second coding sequence encodes a molecule (e.g., an RNA molecule or a second protein) having a substantially equal size to the protein encoded by the protein encoding gene.

[0264] In certain embodiments, the second gene has a coding sequence between about 300 bp and about 6000 bp. In certain embodiments, the coding sequence is between about 400 bp and about 5000 bp. In certain embodiments, the coding sequence is between about 500 bp and about 4000 bp. In certain embodiments, the coding sequence is between about 600 bp and about 3000 bp. In certain embodiments, the coding sequence is between about 700 bp and about 2000 bp. In certain embodiments, the coding sequence is between about 800 bp and about 2000 bp. In certain embodiments, the coding sequence is between about 900 bp and about 2000 bp. In certain embodiments, the coding sequence is between about 1000 bp and about 2000 bp. In certain embodiments, the coding sequence is between about 1100 bp and about 2000 bp. In certain embodiments, the coding sequence is between about 1200 bp and about 2000 bp. In certain embodiments, the coding sequence is between about 1300 bp and about 2000 bp. In certain embodiments, the coding sequence is between about 1400 bp and about 1900 bp. In certain embodiments, the coding sequence is between about 1400 bp and about 1800 bp. In certain embodiments, the coding sequence is between about 1400 bp and about 1700 bp. In certain embodiments, the coding sequence is between about 1400 bp and about 1500 bp.

[0265] In some embodiments, the compact bidirectional promoter is an H1 promoter. In some embodiments, the H1 promoter is a human H1 promoter. In certain embodiments, the nucleic acid comprises a compact bidirectional promoter and a coding sequence that encodes a cystic fibrosis transmembrane conductance regulator (CFTR), ATP7B, ATP7A, AGL, CPS1, or a functional fragment or variant thereof. In certain embodiments, the nucleic acid having a compact bidirectional promoter has a coding sequence encoding CFTR as described herein. In certain embodiments, an expression construct having a compact bidirectional promoter can be expressed in any target cell described herein. In certain embodiments, the invention herein provides a vector including the expression construct encoding the compact bidirectional promoter as described herein. Furthermore, in some embodiments, the vector is any of the herein described AAV vectors.

### V. Construction of rAAV Vectors

[0266] The disclosure provides recombinant AAV (rAAV) vectors comprising a large gene (e.g., CFTR, ATP7B, ATP7A, AGL, DMD, and CPS1), or a functional fragment or variant thereof, under the control of a suitable promoter (e.g., a compact promoter) to direct the expression of the large gene, or functional fragment or variant thereof in a target cell. In certain embodiments, the rAAV vectors include the coding sequence of at least one of the large genes herein described (e.g., CFTR, ATP7B, ATP7A, AGL, DMD, and CPS1). In certain embodiments, the coding sequence is expressed in a target cell. In certain embodiments, the target cell is a lung cell, a pancreatic cell, a liver cell, or a neuronal cell. The disclosure further provides a therapeutic composition comprising an rAAV vector comprising a large gene (e.g. CFTR, ATP7B, ATP7A, AGL, DMD, and CPS1), or a functional fragment or variant thereof under the control of a suitable promoter (e.g., a compact promoter). A variety of rAAV vectors may be used to deliver the desired complement system gene to the appropriate cells and/or tissues and to direct its expression. More than 30 naturally occurring serotypes of AAV from humans and non-human primates are known. Many natural variants of the AAV capsid exist, and an rAAV vector of the disclosure may be designed based on an AAV with properties specifically suited for expression in the cells and/or tissues relevant for the large gene (e.g. CFTR, ATP7B, ATP7A, AGL, DMD, and CPS1) to be expressed.

[0267] In general, an rAAV vector is comprised of, in order, a 5′ adeno-associated virus inverted terminal repeat, a transgene or gene of interest encoding a complement system polypeptide (e.g. CFTR, ATP7B, ATP7A, AGL, DMD, and CPS1) or a functional fragment or variant thereof operably linked to a sequence which regulates its expression in a target cell, and a 3′ adeno-associated virus inverted terminal repeat. In addition, the rAAV vector may preferably have a polyadenylation sequence. Generally, rAAV vectors should have one copy of the AAV ITR at each end of the transgene or gene of interest, in order to allow replication, packaging, and efficient integration into cell chromosomes. Within preferred embodiments of the disclosure, the transgene sequence encoding a complement system polypeptide (or a functional fragment or variant thereof) or a biologically active fragment thereof will be of about 2 to 5 kb in length (or alternatively, the transgene may additionally contain a “stuffer” or “filler” sequence to bring the total size of the nucleic acid sequence between the two ITRs to between 2 and 5 kb).

[0268] Recombinant AAV vectors of the present disclosure may be generated from a variety of adeno-associated viruses to provide the rAAV with cell-type-specific targeting capacity or tropism. For example, ITRs from any AAV serotype are expected to have similar structures and functions with regard to replication, integration, excision and transcriptional mechanisms. Examples of AAV serotypes include AAV1, AAV2, AAV3, AAV4, AAV5, AAV6, AAV7, AAV8, AAV9, AAV10, AAV11 and AAV12. In some embodiments, the rAAV vector is generated from serotype AAV1, AAV2, AAV4, AAV5, or AAV8. These serotypes are known to target photoreceptor cells or the retinal pigment epithelium. In particular embodiments, the rAAV vector is generated from serotype AAV2. In certain embodiments, the AAV serotypes include AAVrh8, AAVrh8R or AAVrh10. It will also be understood that the rAAV vectors may be chimeras of two or more serotypes selected from serotypes AAV 1 through AAV12. The tropism of the vector may be altered by packaging the recombinant genome of one serotype into capsids derived from another AAV serotype. In some embodiments, the ITRs of the rAAV virus may be based on the ITRs of any one of AAV 1-12 and may be combined with an AAV capsid selected from any one of AAV1-12, AAV-DJ, AAV-DJ8, AAV-DJ9 or other modified serotypes. In certain embodiments, any AAV capsid serotype may be used with the vectors of the disclosure.

[0269] Examples of AAV serotypes include AAV1, AAV2, AAV3, AAV4, AAV5, AAV6, AAV7, AAV8, AAV9, AAV10, AAV11, AAV 12, AAV-DJ, AAV-DJ8, AAV-DJ9, AAVrh8, AAVrh8R or AAVrh10. In certain embodiments, the AAV capsid serotype is AAV2.

[0270] Desirable AAV fragments for assembly into vectors may include the cap proteins, including the vp1, vp2, vp3 and hypervariable regions, the rep proteins, including rep 78, rep 68, rep 52, and rep 40, and the sequences encoding these proteins. These fragments may be readily utilized in a variety of vector systems and host cells. Such fragments maybe used, alone, in combination with other AAV serotype sequences or fragments, or in combination with elements from other AAV or non-AAV viral sequences. As used herein, artificial AAV serotypes include, without limitation, AAV with a non-naturally occurring capsid protein. Such an artificial capsid may be generated by any suitable technique using a selected AAV sequence (e.g., a fragment of a vp1 capsid protein) in combination with heterologous sequences which may be obtained from a different selected AAV serotype, non-contiguous portions of the same AAV serotype, from a non-AAV viral source, or from a non-viral source. An artificial AAV serotype may be, without limitation, a pseudotyped AAV, a chimeric AAV capsid, a recombinant AAV capsid, or a “humanized” AAV capsid.

[0271] Pseudotyped vectors, wherein the capsid of one AAV is replaced with a heterologous capsid protein, are useful in the disclosure. In some embodiments, the AAV is AAV2/5. In another embodiment, the AAV is AAV2/8. When pseudotyping an AAV vector, the sequences encoding each of the essential rep proteins may be supplied by different AAV sources (e.g., AAV1, AAV2, AAV3, AAV4, AAV5, AAV6, AAV7, AAV8). For example, the rep78/68 sequences may be from AAV2, whereas the rep52/40 sequences may be from AAV8.

[0272] In one embodiment, the vectors of the disclosure contain, at a minimum, sequences encoding a selected AAV serotype capsid, e.g., an AAV2 capsid or a fragment thereof. In another embodiment, the vectors of the disclosure contain, at a minimum, sequences encoding a selected AAV serotype rep protein, e.g., AAV2 rep protein, or a fragment thereof.

[0273] Optionally, such vectors may contain both AAV cap and rep proteins. In vectors in which both AAV rep and cap are provided, the AAV rep and AAV cap sequences can both be of one serotype origin, e.g., all AAV2 origin. In certain embodiments, the vectors may comprise rep sequences from an AAV serotype which differs from that which is providing the cap sequences. In some embodiments, the rep and cap sequences are expressed from separate sources (e.g., separate vectors, or a host cell and a vector). In some embodiments, these rep sequences are fused in frame to cap sequences of a different AAV serotype to form a chimeric AAV vector, such as AAV2/8 described in U.S. Pat. No. 7,282,199, which is incorporated by reference herein. Examples of AAV serotypes include AAV1, AAV2, AAV3, AAV4, AAV5, AAV6, AAV7, AAV8, AAV9, AAV10, AAV11, AAV 12, AAV-DJ, AAV-DJ8, AAV-DJ9, AAVrh8, AAVrh8R or AAVrh10. In some embodiments, the cap is derived from AAV2.

[0274] In some embodiments, any of the vectors disclosed herein includes a spacer, i.e., a DNA sequence interposed between the promoter and the rep gene ATG start site. In some embodiments, the spacer may be a random sequence of nucleotides, or alternatively, it may encode a gene product, such as a marker gene. In some embodiments, the spacer may contain genes which typically incorporate start/stop and polyA sites. In some embodiments, the spacer may be a non-coding DNA sequence from a prokaryote or eukaryote, a repetitive non-coding sequence, a coding sequence without transcriptional controls or a coding sequence with transcriptional controls. In some embodiments, the spacer is a phage ladder sequences or a yeast ladder sequence. In some embodiments, the spacer is of a size sufficient to reduce expression of the rep78 and rep68 gene products, leaving the rep52, rep40 and cap gene products expressed at normal levels. In some embodiments, the length of the spacer may therefore range from about 10 bp to about 10.0 kbp, preferably in the range of about 100 bp to about 8.0 kbp. In some embodiments, the spacer is less than 2 kbp in length.

[0275] In certain embodiments, the capsid is modified to improve therapy. The capsid may be modified using conventional molecular biology techniques. In certain embodiments, the capsid is modified for minimized immunogenicity, better stability and particle lifetime, efficient degradation, and/or accurate delivery of the large gene or a functional fragment or variant thereof to the nucleus. In some embodiments, the modification or mutation is an amino acid deletion, insertion, substitution, or any combination thereof in a capsid protein. A modified polypeptide may comprise 1, 2, 3, 4, 5, up to 10, or more amino acid substitutions and/or deletions and/or insertions. A “deletion” may comprise the deletion of individual amino acids, deletion of small groups of amino acids such as 2, 3, 4 or 5 amino acids, or deletion of larger amino acid regions, such as the deletion of specific amino acid domains or other features. An “insertion” may comprise the insertion of individual amino acids, insertion of small groups of amino acids such as 2, 3, 4 or 5 amino acids, or insertion of larger amino acid regions, such as the insertion of specific amino acid domains or other features. A “substitution” comprises replacing a wild type amino acid with another (e.g., a non-wild type amino acid). In some embodiments, the another (e.g., non-wild type) or inserted amino acid is Ala (A), His (H), Lys (K), Phe (F), Met (M), Thr (T), Gln (Q), Asp (D), or Glu (E). In some embodiments, the another (e.g., non-wild type) or inserted amino acid is A. In some embodiments, the another (e.g., non-wild type) amino acid is Arg (R), Asn (N), Cys (C), Gly (G), lie (I), Leu (L), Pro (P), Ser (S), Trp (W), Tyr (Y), or Val (V). Conventional or naturally occurring amino acids are divided into the following basic groups based on common side-chain properties: (1) non-polar: Norleucine, Met, Ala, Val, Leu, He; (2) polar without charge: Cys, Ser, Thr, Asn, Gln; (3) acidic (negatively charged): Asp, Glu; (4) basic (positively charged): Lys, Arg; and (5) residues that influence chain orientation: Gly, Pro; and (6) aromatic: Trp, Tyr, Phe, His. Conventional amino acids include L or D stereochemistry. In some embodiments, the another (e.g., non-wild type) amino acid is a member of a different group (e.g., an aromatic amino acid is substituted for a non-polar amino acid). Substantial modifications in the biological properties of the polypeptide are accomplished by selecting substitutions that differ significantly in their effect on maintaining (a) the structure of the polypeptide backbone in the area of the substitution, for example, as a R-sheet or helical conformation, (b) the charge or hydrophobicity of the molecule at the target site, or (c) the bulk of the side chain. Naturally occurring residues are divided into groups based on common side-chain properties: (1) Non-polar: Norleucine, Met, Ala, Val, Leu, Ile; (2) Polar without charge: Cys, Ser, Thr, Asn, Gln; (3) Acidic (negatively charged): Asp, Glu; (4) Basic (positively charged): Lys, Arg; (5) Residues that influence chain orientation: Gly, Pro; and (6) Aromatic: Trp, Tyr, Phe, His. In some embodiments, the another (e.g., non-wild type) amino acid is a member of a different group (e.g., a hydrophobic amino acid for a hydrophilic amino acid, a charged amino acid for a neutral amino acid, an acidic amino acid for a basic amino acid, etc.). In some embodiments, the another (e.g., non-wild type) amino acid is a member of the same group (e.g., another basic amino acid, another acidic amino acid, another neutral amino acid, another charged amino acid, another hydrophilic amino acid, another hydrophobic amino acid, another polar amino acid, another aromatic amino acid or another aliphatic amino acid). In some embodiments, the another (e.g., non-wild type) amino acid is an unconventional amino acid. Unconventional amino acids are non-naturally occurring amino acids. Examples of an unconventional amino acid include, but are not limited to, aminoadipic acid, beta-alanine, beta-aminopropionic acid, aminobutyric acid, piperidinic acid, aminocaprioic acid, aminoheptanoic acid, aminoisobutyric acid, aminopimelic acid, citrulline, diaminobutyric acid, desmosine, diaminopimelic acid, diaminopropionic acid, N-ethylglycine, N-ethylaspargine, hyroxylysine, allo-hydroxylysine, hydroxyproline, isodesmosine, allo-isoleucine, N-methylglycine, sarcosine, N-methylisoleucine, N-methylvaline, norvaline, norleucine, orithine, 4-hydroxyproline, γ-carboxyglutamate, ε-N,N,N-trimethyllysine, ε-N-acetyllysine, O-phosphoserine, N-acetylserine, N-formylmethionine, 3-methylhistidine, 5-hydroxy lysine, σ-N-methylarginine, and other similar amino acids and amino acids (e.g., 4-hydroxyproline). In some embodiments, one or more amino acid substitutions are introduced into one or more of VP1, VP2 and VP3. In one aspect, a modified capsid protein comprises 1, 2, 3, 4, 5, 6, 7, 8, 9, 10, 11, 12, 13, 14, or 15 conservative or non-conservative substitutions relative to the wild-type polypeptide. In another aspect, the modified capsid polypeptide of the disclosure comprises modified sequences, wherein such modifications can include both conservative and non-conservative substitutions, deletions, and/or additions, and typically include peptides that share at least 60%, at least 65%, at least 70%, at least 75%, at least 80%, at least 85%, at least 87%, at least 89%, at least 90%, at least 91%, at least 92%, at least 93%, at least 94%, at least 95%, at least 96%, at least 97%, at least 98%, or at least 99% sequence identity to the corresponding wild-type capsid protein.

[0276] In some embodiments, the recombinant AAV vector, rep sequences, cap sequences, and helper functions required for producing the rAAV of the disclosure may be delivered to the packaging host cell using any appropriate genetic element (vector). In some embodiments, a single nucleic acid encoding all three capsid proteins (e.g., VP1, VP2 and VP3) is delivered into the packaging host cell in a single vector. In some embodiments, nucleic acids encoding the capsid proteins are delivered into the packaging host cell by two vectors; a first vector comprising a first nucleic acid encoding two capsid proteins (e.g., VP1 and VP2) and a second vector comprising a second nucleic acid encoding a single capsid protein (e.g., VP3). In some embodiments, three vectors, each comprising a nucleic acid encoding a different capsid protein, are delivered to the packaging host cell. The selected genetic element may be delivered by any suitable method, including those described herein. The methods used to construct any embodiment of this disclosure are known to those with skill in nucleic acid manipulation and include genetic engineering, recombinant engineering, and synthetic techniques. See, e.g., Sambrook et al., Molecular Cloning: A Laboratory Manual, Cold Spring Harbor Press, Cold Spring Harbor, N.Y. Similarly, methods of generating rAAV virions are well known and the selection of a suitable method is not a limitation on the present disclosure. See, e.g., K. Fisher et al., J. VIROL., 70:520-532 (1993) and U.S. Pat. No. 5,478,745. These publications are incorporated by reference herein.

[0277] In some embodiments, recombinant AAVs may be produced using the triple transfection method (described in detail in U.S. Pat. No. 6,001,650). Typically, the recombinant AAVs are produced by transfecting a host cell with an recombinant AAV vector (comprising a transgene) to be packaged into AAV particles, an AAV helper function vector, and an accessory function vector. An AAV helper function vector encodes the “AAV helper function” sequences (e.g., rep and cap), which function in trans for productive AAV replication and encapsidation. Preferably, the AAV helper function vector supports efficient AAV vector production without generating any detectable wild-type AAV virions (e.g., AAV virions containing functional rep and cap genes). In some embodiments, vectors suitable for use with the present disclosure may be pHLP19, described in U.S. Pat. No. 6,001,650 and pRep6cap6 vector, described in U.S. Pat. No. 6,156,303, the entirety of both incorporated by reference herein. The accessory function vector encodes nucleotide sequences for non-AAV derived viral and/or cellular functions upon which AAV is dependent for replication (e.g., “accessory functions”). The accessory functions include those functions required for AAV replication, including, without limitation, those moieties involved in activation of AAV gene transcription, stage specific AAV mRNA splicing, AAV DNA replication, synthesis of cap expression products, and AAV capsid assembly. Viral-based accessory functions can be derived from any of the known helper viruses such as adenovirus, herpesvirus (other than herpes simplex virus type-1), and vaccinia virus.

[0278] Cells may also be transfected with a vector (e.g., helper vector) which provides helper functions to the AAV. The vector providing helper functions may provide adenovirus functions, including, e.g., E1a, E1b, E2a, E40RF6. The sequences of adenovirus gene providing these functions may be obtained from any known adenovirus serotype, such as serotypes 2, 3, 4, 7, 12 and 40, and further including any of the presently identified human types known in the art. Thus, in some embodiments, the methods involve transfecting the cell with a vector expressing one or more genes necessary for AAV replication, AAV gene transcription, and/or AAV packaging.

[0279] An rAAV vector of the disclosure is generated by introducing a nucleic acid sequence encoding an AAV capsid protein, or fragment thereof; a functional rep gene or a fragment thereof; a minigene composed of, at a minimum, AAV inverted terminal repeats (ITRs) and a transgene; and sufficient helper functions to permit packaging of the minigene into the AAV capsid, into a host cell. The components required for packaging an AAV minigene into an AAV capsid may be provided to the host cell in trans. Alternatively, any one or more of the required components (e.g., minigene, rep sequences, cap sequences, and/or helper functions) may be provided by a stable host cell which has been engineered to contain one or more of the required components using methods known to those of skill in the art.

[0280] In some embodiments, such a stable host cell will contain the required component(s) under the control of an inducible promoter. Alternatively, the required component(s) may be under the control of a constitutive promoter. Examples of suitable inducible and constitutive promoters are provided herein, in the discussion below of regulator elements suitable for use with the transgene, i.e., a nucleic acid comprising a large gene or a functional fragment or variant thereof (e.g. CFTR, ATP7B, ATP7A, AGL, DMD, and CPS1). In still another alternative, a selected stable host cell may contain selected components under the control of a constitutive promoter and other selected components under the control of one or more inducible promoters. For example, a stable host cell may be generated which is derived from 293 cells (which contain E1 helper functions under the control of a constitutive promoter), but which contains the rep and/or cap proteins under the control of inducible promoters. Still other stable host cells may be generated by one of skill in the art.

[0281] The minigene, rep sequences, cap sequences, and helper functions required for producing the rAAV of the disclosure may be delivered to the packaging host cell in the form of any genetic element which transfers the sequences. The selected genetic element may be delivered by any suitable method known in the art. See, e.g., Sambrook et al., Molecular Cloning: A Laboratory Manual, Cold Spring Harbor Press, Cold Spring Harbor, NY.

[0282] Unless otherwise specified, the AAV ITRs, and other selected AAV components described herein, may be readily selected from among any AAV serotype, including, without limitation, AAV1, AAV2, AAV3, AAV4, AAV5, AAV6, AAV7, AAV8, AAV9, AAV10, AAV10, AAV11, AAV 12, AAV-DJ, AAV-DJ8, AAV-DJ9, AAVrh8, AAVrh8R or AAVrh10 or other known and unknown AAV serotypes. These ITRs or other AAV components may be readily isolated using techniques available to those of skill in the art from an AAV serotype. Such AAV may be isolated or obtained from academic, commercial, or public sources (e.g., the American Type Culture Collection, Manassas, VA). Alternatively, the AAV sequences may be obtained through synthetic or other suitable means by reference to published sequences such as are available in the literature or in databases such as, e.g., GenBank, PubMed, or the like.

[0283] The minigene is composed of, at a minimum, a transgene comprising a large gene or a functional fragment or variant thereof (e.g. CFTR, ATP7B, ATP7A, AGL, DMD, and CPS1), as described above, and its regulatory sequences, and 5′ and 3′ AAV inverted terminal repeats (ITRs). In one desirable embodiment, the ITRs of AAV serotype 2 are used. However, ITRs from other suitable serotypes may be selected. The minigene is packaged into a capsid protein and delivered to a selected host cell.

[0284] In some embodiments, regulatory sequences are operably linked to the transgene comprising a large gene or a functional fragment or variant thereof (e.g. CFTR, ATP7B, ATP7A, AGL, DMD, and CPS1). The regulatory sequences may include conventional control elements which are operably linked to the complement system gene, splice variant, or a fragment thereof in a manner which permits its transcription, translation and/or expression in a cell transfected with the vector or infected with the virus produced by the disclosure.

[0285] The regulatory sequences useful in the constructs of the present disclosure may also contain an intron, desirably located between the promoter/enhancer sequence and the gene. In some embodiments, the intron sequence is derived from SV-40, and is a 100 bp mini-intron splice donor/splice acceptor referred to as SD-SA. Another suitable sequence includes the woodchuck hepatitis virus post-transcriptional element. (See, e.g., L. Wang and I. Verma, 1999 PROC. NATL. ACAD. SCI., USA, 96:3906-3910). PolyA signals may be derived from many suitable species, including, without limitation SV-40, human and bovine.

[0286] Another regulatory component of the rAAV useful in the method of the disclosure is an internal ribosome entry site (IRES). An IRES sequence, or other suitable systems, may be used to produce more than one polypeptide from a single gene transcript (for example, to produce more than one complement system polypeptides). An IRES (or other suitable sequence) is used to produce a protein that contains more than one polypeptide chain or to express two different proteins from or within the same cell. An exemplary IRES is the poliovirus internal ribosome entry sequence, which supports transgene expression in photoreceptors, RPE and ganglion cells. Preferably, the IRES is located 3′ to the transgene in the rAAV vector.

[0287] In some embodiments, expression of the transgene comprising a large gene or a functional fragment or variant thereof (e.g. CFTR, ATP7B, ATP7A, AGL, DMD, and CPS1) is driven by a separate promoter (e.g., a viral promoter). In certain embodiments, any promoters suitable for use in AAV vectors may be used with the vectors of the disclosure. The selection of the transgene promoter to be employed in the rAAV may be made from among a wide number of constitutive or inducible promoters that can express the selected transgene in the desired cell. Examples of suitable promoters are described in detail below.

[0288] Other regulatory sequences useful in the disclosure include enhancer sequences. Enhancer sequences useful in the disclosure include the 1RBP enhancer, immediate early cytomegalovirus enhancer, one derived from an immunoglobulin gene or SV40 enhancer, the cis-acting element identified in the mouse proximal promoter, etc.

[0289] Selection of these and other common vector and regulatory elements are well-known and many such sequences are available. See, e.g., Sambrook et al., and references cited therein at, for example, pages 3.18-3.26 and 16, 17-16.27 and Ausubel et al., Current Protocols in Molecular Biology, John Wiley & Sons, New York, 1989).

[0290] The rAAV vector may also contain additional sequences, for example from an adenovirus, which assist in effecting a desired function for the vector. Such sequences include, for example, those which assist in packaging the rAAV vector in adenovirus-associated virus particles.

[0291] The rAAV vector may also contain a reporter sequence for co-expression, such as but not limited to lacZ, GFP, CFP, YFP, RFP, mCherry, tdTomato, etc. In some embodiments, the rAAV vector may comprise a selectable marker. In some embodiments, the selectable marker is an antibiotic-resistance gene. In some embodiments, the antibiotic-resistance gene is an ampicillin-resistance gene. In some embodiments, the ampicillin-resistance gene is beta-lactamase.

[0292] In some embodiments, the rAAV particle is an ssAAV. In some embodiments, the rAAV particle is a self-complementary AAV (sc-AAV) (See, US 2012/0141422 which is incorporated herein by reference). Self-complementary vectors package an inverted repeat genome that can fold into dsDNA without the requirement for DNA synthesis or base-pairing between multiple vector genomes. Because scAAV have no need to convert the single-stranded DNA (ssDNA) genome into double-stranded DNA (dsDNA) prior to expression, they are more efficient vectors. However, the trade-off for this efficiency is the loss of half the coding capacity of the vector, ScAAV are useful for small protein-coding genes (up to −55 kd) and any currently available RNA-based therapy.

[0293] The single-stranded nature of the AAV genome may impact the expression of rAAV vectors more than any other biological feature. Rather than rely on potentially variable cellular mechanisms to provide a complementary-strand for rAAV vectors, it has now been found that this problem may be circumvented by packaging both strands as a single DNA molecule. In the studies described herein, an increased efficiency of transduction from duplexed vectors over conventional rAAV was observed in He La cells (5-140 fold). More importantly, unlike conventional single-stranded AAV vectors, inhibitors of DNA replication did not affect transduction from the duplexed vectors of the invention. In addition, the inventive duplexed parvovirus vectors displayed a more rapid onset and a higher level of transgene expression than did rAAV vectors in mouse hepatocytes in vivo. All of these biological attributes support the generation and characterization of a new class of parvovirus vectors (delivering duplex DNA) that significantly contribute to the ongoing development of parvovirus-based gene delivery systems.

[0294] Overall, a novel type of parvovirus vector that carries a duplexed genome, which results in co-packaging strands of plus and minus polarity tethered together in a single molecule, has been constructed and characterized by the investigations described herein. Accordingly, the present invention provides a parvovirus particle comprising a parvovirus capsid (e.g., an AAV capsid) and a vector genome encoding a heterologous nucleotide sequence, where the vector genome is self-complementary, i.e., the vector genome is a dimeric inverted repeat. The vector genome is preferably approximately the size of the wild-type parvovirus genome (e.g., the AAV genome) corresponding to the parvovirus capsid into which it will be packaged and comprises an appropriate packaging signal. The present invention further provides the vector genome described above and templates that encode the same.

[0295] rAAV vectors useful in the methods of the disclosure are further described in PCT publication No. WO2015168666 and PCT publication no. WO2014011210, the contents of which are incorporated by reference herein.

[0296] In some embodiments, any of the vectors disclosed herein is capable of inducing at least 20%, 50%, 100%, 150%, 200%, 250%, 300%, 400%, 500%, 700%, 900%, 1000%, 1100%, 1500%, or 2000% higher expression of CFTR, ATP7B, ATP7A, AGL, DMD, or CPS1 in a target cell as compared to the endogenous expression of CFTR, ATP7B, ATP7A, AGL, DMD, or CPS1 in the target cell. In some embodiments, expression of any of the vectors disclosed herein in a target cell results in at least 20%, 50%, 100%, 150%, 200%, 250%, 300%, 400%, 500%, 700%, 900%, 1000%, 1100%, 1500%, or 2000% higher levels of CFTR, ATP7B, ATP7A, AGL, DMD, or CPS1 activity in the target cell as compared to endogenous levels of CFTR, ATP7B, ATP7A, AGL, DMD, or CPS1 activity in the target cell.

### VI. Production of rAAV Vectors

[0297] Numerous methods are known in the art for production of rAAV vectors, including transfection, stable cell line production, and infectious hybrid virus production systems which include adenovirus-AAV hybrids, herpesvirus-AAV hybrids (Conway, J E et al., (1997). Virology 71(11):8780-8789) and baculovirus-AAV hybrids. rAAV production cultures for the production of rAAV virus particles all require; 1) suitable host cells, including, for example, human-derived cell lines such as HeLa, A549, or 293 cells, or insect-derived cell lines such as SF-9, in the case of baculovirus production systems; 2) suitable helper virus function, provided by wild-type or mutant adenovirus (such as temperature sensitive adenovirus), herpes virus, baculovirus, or a plasmid construct providing helper functions; 3) AAV rep and cap genes and gene products; 4) a transgene (such as a transgene comprising a large gene (e.g. CFTR, ATP7B, ATP7A, AGL, DMD, and CPS1), or a functional fragment or variant thereof) flanked by at least one AAV ITR sequence; and 5) suitable media and media components to support rAAV production. Suitable media known in the art may be used for the production of rAAV vectors. These media include, without limitation, media produced by Hyclone Laboratories and JRH including Modified Eagle Medium (MEM), Dulbecco's Modified Eagle Medium (DMEM), custom formulations such as those described in U.S. Pat. No. 6,566,118, and Sf-900 II SFM media as described in U.S. Pat. No. 6,723,551, each of which is incorporated herein by reference in its entirety, particularly with respect to custom media formulations for use in production of recombinant AAV vectors.

[0298] The rAAV particles can be produced using methods known in the art. See, e.g., U.S. Pat. Nos. 6,566,118; 6,989,264; and 6,995,006. In practicing the disclosure, host cells for producing rAAV particles include mammalian cells, insect cells, plant cells, microorganisms and yeast. Host cells can also be packaging cells in which the AAV rep and cap genes are stably maintained in the host cell or producer cells in which the AAV vector genome is stably maintained. Exemplary packaging and producer cells are derived from 293, A549 or HeLa cells. AAV vectors are purified and formulated using standard techniques known in the art.

[0299] Recombinant AAV particles are generated by transfecting producer cells with a plasmid (cis-plasmid) containing a rAAV genome comprising a transgene flanked by the 145 nucleotide-long AAV ITRs and a separate construct expressing the AAV rep and CAP genes in trans. In addition, adenovirus helper factors such as ETA, E1B, E2A, E40RF6 and VA RNAs, etc. may be provided by either adenovirus infection or by transfecting a third plasmid providing adenovirus helper genes into the producer cells. Producer cells may be HEK293 cells. Packaging cell lines suitable for producing adeno-associated viral vectors may be readily accomplished given readily available techniques (see e.g., U.S. Pat. No. 5,872,005). The helper factors provided will vary depending on the producer cells used and whether the producer cells already carry some of these helper factors.

[0300] In some embodiments, rAAV particles may be produced by a triple transfection method, such as the exemplary triple transfection method provided infra. Briefly, a plasmid containing a rep gene and a capsid gene, along with a helper adenoviral plasmid, may be transfected (e.g., using the calcium phosphate method) into a cell line (e.g., HEK-293 cells), and virus may be collected and optionally purified.

[0301] In some embodiments, rAAV particles may be produced by a producer cell line method, such as the exemplary producer cell line method provided infra (see also (referenced in Martin et al., (2013) HUMAN GENE THERAPY METHODS 24:253-269). Briefly, a cell line (e.g., a HeLa cell line) may be stably transfected with a plasmid containing a rep gene, a capsid gene, and a promoter-transgene sequence. Cell lines may be screened to select a lead clone for rAAV production, which may then be expanded to a production bioreactor and infected with an adenovirus (e.g., a wild-type adenovirus) as helper to initiate rAAV production. Virus may subsequently be harvested, adenovirus may be inactivated (e.g., by heat) and/or removed, and the rAAV particles may be purified.

[0302] In some aspects, a method is provided for producing any rAAV particle as disclosed herein comprising (a) culturing a host cell under a condition that rAAV particles are produced, wherein the host cell comprises (i) one or more AAV package genes, wherein each said AAV packaging gene encodes an AAV replication and/or encapsidation protein; (ii) a rAAV pro-vector comprising a nucleic acid encoding a therapeutic polypeptide and/or nucleic acid as described herein flanked by at least one AAV ITR, and (iii) an AAV helper function; and (b) recovering the rAAV particles produced by the host cell. In some embodiments, said at least one AAV ITR is selected from the group consisting of AAV ITRs are AAV1, AAV2, AAV3, AAV4, AAV5, AAV6, AAV7, AAV8, AAVrh8, AAVrh8R, AAV9, AAV10, AAVrh10, AAV11, AAV 12, AAV2R471A, AAV DJ, a goat AAV, bovine AAV, or mouse AAV or the like. In some embodiments, the encapsidation protein is an AAV2 encapsidation protein.

[0303] Suitable rAAV production culture media of the present disclosure may be supplemented with serum or serum-derived recombinant proteins at a level of 0.5-20 (v/v or w/v). Alternatively, as is known in the art, rAAV vectors may be produced in serum-free conditions which may also be referred to as media with no animal-derived products. One of ordinary skill in the art may appreciate that commercial or custom media designed to support production of rAAV vectors may also be supplemented with one or more cell culture components know in the art, including without limitation glucose, vitamins, amino acids, and or growth factors, in order to increase the titer of rAAV in production cultures.

[0304] rAAV production cultures can be grown under a variety of conditions (over a wide temperature range, for varying lengths of time, and the like) suitable to the particular host cell being utilized. As is known in the art, rAAV production cultures include attachment-dependent cultures which can be cultured in suitable attachment-dependent vessels such as, for example, roller bottles, hollow fiber filters, microcarriers, and packed-bed or fluidized-bed bioreactors. rAAV vector production cultures may also include suspension-adapted host cells such as HeLa, 293, and SF-9 cells which can be cultured in a variety of ways including, for example, spinner flasks, stirred tank bioreactors, and disposable systems such as the Wave bag system.

[0305] rAAV vector particles of the disclosure may be harvested from rAAV production cultures by lysis of the host cells of the production culture or by harvest of the spent media from the production culture, provided the cells are cultured under conditions known in the art to cause release of rAAV particles into the media from intact cells, as described more fully in U.S. Pat. No. 6,566,118). Suitable methods of lysing cells are also known in the art and include for example multiple freeze/thaw cycles, sonication, microfluidization, and treatment with chemicals, such as detergents and/or proteases.

[0306] In a further embodiment, the rAAV particles are purified. The term “purified” as used herein includes a preparation of rAAV particles devoid of at least some of the other components that may also be present where the rAAV particles naturally occur or are initially prepared from. Thus, for example, isolated rAAV particles may be prepared using a purification technique to enrich it from a source mixture, such as a culture lysate or production culture supernatant. Enrichment can be measured in a variety of ways, such as, for example, by the proportion of DNase-resistant particles (DRPs) or genome copies (gc) present in a solution, or by infectivity, or it can be measured in relation to a second, potentially interfering substance present in the source mixture, such as contaminants, including production culture contaminants or in-process contaminants, including helper virus, media components, and the like.

[0307] In some embodiments, the rAAV production culture harvest is clarified to remove host cell debris. In some embodiments, the production culture harvest is clarified by filtration through a series of depth filters including, for example, a grade DOHC Millipore Millistak+HC Pod Filter, a grade A1HC Millipore Millistak+HC Pod Filter, and a 0.2 pvi Filter Opticap XL 10 Millipore Express SHC Hydrophilic Membrane filter. Clarification can also be achieved by a variety of other standard techniques known in the art, such as, centrifugation or filtration through any cellulose acetate filter of 0.2 pvil or greater pore size known in the art.

[0308] In some embodiments, the rAAV production culture harvest is further treated with Benzonase® to digest any high molecular weight DNA present in the production culture. In some embodiments, the Benzonase® digestion is performed under standard conditions known in the art including, for example, a final concentration of 1-2.5 units/ml of Benzonase® at a temperature ranging from ambient to 37° C. for a period of 30 minutes to several hours.

[0309] rAAV particles may be isolated or purified using one or more of the following purification steps: equilibrium centrifugation; flow-through anionic exchange filtration; tangential flow filtration (TFF) for concentrating the rAAV particles; rAAV capture by apatite chromatography; heat inactivation of helper virus; rAAV capture by hydrophobic interaction chromatography; buffer exchange by size exclusion chromatography (SEC); nanofiltration; and rAAV capture by anionic exchange chromatography, cationic exchange chromatography, or affinity chromatography. These steps may be used alone, in various combinations, or in different orders. In some embodiments, the method comprises all the steps in the order as described below. Methods to purify rAAV particles are found, for example, in Xiao et al., (1998) JOURNAL OF VIROLOGY 72:2224-2232; U.S. Pat. Nos. 6,989,264 and 8,137,948; and WO 2010/148143.

### VII. Pharmaceutical Compositions

[0310] Also provided herein are pharmaceutical compositions comprising a nucleic acid comprising a large gene (e.g. CFTR, ATP7B, ATP7A, AGL, DMD, and CPS1), or a functional fragment or variant thereof, and a pharmaceutically acceptable carrier. The pharmaceutical compositions may be suitable for any mode of administration described herein.

[0311] In some embodiments, the pharmaceutical compositions comprising a nucleic acid described herein and a pharmaceutically acceptable carrier is suitable for administration to a human subject. Such carriers are well known in the art (see, e.g., Remington's Pharmaceutical Sciences, 15th Edition, pp. 1035-1038 and 1570-1580). Such pharmaceutically acceptable carriers can be sterile liquids, such as water and oil, including those of petroleum, animal, vegetable or synthetic origin, such as peanut oil, soybean oil, mineral oil, and the like. Saline solutions and aqueous dextrose, polyethylene glycol (PEG) and glycerol solutions can also be employed as liquid carriers, particularly for injectable solutions. The pharmaceutical composition may further comprise additional ingredients, for example preservatives, buffers, tonicity agents, antioxidants and stabilizers, nonionic wetting or clarifying agents, viscosity-increasing agents, and the like. The pharmaceutical compositions described herein can be packaged in single unit dosages or in multidosage forms. The compositions are generally formulated as sterile and substantially isotonic solution.

[0312] In one embodiment, the nucleic acid comprising the desired large gene (e.g. CFTR, ATP7B, ATP7A, AGL, DMD, and CPS1), or a functional fragment or variant thereof and constitutive or tissue or cell-specific promoter for use in the target cells as detailed above is formulated into a pharmaceutical composition intended for oral, inhalation, intranasal, intratracheal, intravenous, intramuscular, subcutaneous, intradermal, and other parental routes of administration. Such formulation involves the use of a pharmaceutically and/or physiologically acceptable vehicle or carrier, such as buffered saline or other buffers, e.g., HEPES, to maintain pH at appropriate physiological levels, and, optionally, other medicinal agents, pharmaceutical agents, stabilizing agents, buffers, carriers, adjuvants, diluents, etc. For injection, the carrier will typically be a liquid. Exemplary physiologically acceptable carriers include sterile, pyrogen-free water and sterile, pyrogen-free, phosphate buffered saline. A variety of such known carriers are provided in U.S. Pat. No. 7,629,322, incorporated herein by reference. In one embodiment, the carrier is an isotonic sodium chloride solution. In another embodiment, the carrier is balanced salt solution. In one embodiment, the carrier includes tween. If the virus is to be stored long-term, it may be frozen in the presence of glycerol or Tween20. In another embodiment, the pharmaceutically acceptable carrier comprises a surfactant, such as perfluorooctane (Perfluoron liquid). Routes of administration may be combined, if desired.

[0313] The composition may be delivered in a volume of from about 0.1 μL to about 1 mL, including all numbers within the range, depending on the size of the area to be treated, the viral titer used, the route of administration, and the desired effect of the method. In one embodiment, the volume is about 50 μL. In another embodiment, the volume is about 70 μL. In a preferred embodiment, the volume is about 100 μL. In another embodiment, the volume is about 125 μL. In another embodiment, the volume is about 150 μL. In another embodiment, the volume is about 175 μL. In yet another embodiment, the volume is about 200 μL. In another embodiment, the volume is about 250 μL. In another embodiment, the volume is about 300 μL. In another embodiment, the volume is about 450 μL. In another embodiment, the volume is about 500 μL. In another embodiment, the volume is about 600 μL. In another embodiment, the volume is about 750 μL. In another embodiment, the volume is about 850 μL. In another embodiment, the volume is about 1000 μL. An effective concentration of a recombinant adeno-associated virus carrying a nucleic acid sequence encoding the desired transgene under the control of the cell-specific promoter sequence desirably ranges from about 10⁷ and 10¹³ vector genomes per milliliter (vg/mL) (also called genome copies/mL (GC/mL)). The rAAV infectious units are measured as described in S. K. McLaughlin et al., 1988 J. Virol., 62: 1963, which is incorporated herein by reference.

[0314] Preferably, the concentration in the target tissue is from about 1.5×10⁹ vg/mL to about 1.5×10¹² vg/mL, and more preferably from about 1.5×10⁹ vg/mL to about 1.5×10¹¹ vg/mL. In certain preferred embodiments, the effective concentration is about 2.5×10¹⁰ vg to about 1.4×10¹¹. In one embodiment, the effective concentration is about 1.4×10⁸ vg/mL. In one embodiment, the effective concentration is about 3.5×10¹⁰ vg/mL. In another embodiment, the effective concentration is about 5.6×10¹¹ vg/mL. In another embodiment, the effective concentration is about 5.3×10¹² vg/mL. In yet another embodiment, the effective concentration is about 1.5×10¹² vg/mL. In another embodiment, the effective concentration is about 1.5×10¹³ vg/mL. In one embodiment, the effective dosage (total genome copies delivered) is from about 10⁷ to 10¹³ vector genomes. It is desirable that the lowest effective concentration of virus be utilized in order to reduce the risk of undesirable effects, such as toxicity. Still other dosages and administration volumes in these ranges may be selected by the attending physician, taking into account the physical state of the subject, preferably human, being treated, the age of the subject, the particular disorder and the degree to which the disorder, if progressive, has developed.

[0315] Pharmaceutical compositions useful in the methods of the disclosure are further described in PCT publication No. WO2015168666 and PCT publication no. WO2014011210, the contents of which are incorporated by reference herein.

### VIII. Methods of Treatment/Prophylaxis

[0316] Described herein are various methods of preventing, treating, arresting progression of or ameliorating disease and disorders as described herein. Generally, the methods include administering to a subject, e.g., a mammalian subject, in need thereof, an effective amount of a composition comprising a recombinant adeno-associated virus (AAV) described above, carrying a transgene large gene or a functional fragment or variant thereof under the control of regulatory sequences which express the product of the gene in target cells of a subject, and a pharmaceutically acceptable carrier. Any of the AAV described herein are useful in the methods described below.

[0317] In a certain aspect, the disclosure provides a method of treating a subject having a disease as described herein, comprising the step of administering to the subject a vector of the disclosure. In certain embodiments, the vector is administered at a dose between 2.5×10¹⁰ vg and 1.4×10¹¹ vg. In certain embodiments, the vectors are administered at a dose between 1.0×10¹¹ vg and 1.5×10¹³ vg. In certain embodiments, the vectors are administered at a dose between 1.0×10¹¹ vg and 1.5×10¹² vg. In certain embodiments, the vectors are administered at a dose of about 1.4×10¹². In certain embodiments, the vectors are administered at a dose of 1.4×10¹² vg. In certain embodiments, the pharmaceutical compositions of the disclosure comprise a pharmaceutically acceptable carrier. In certain embodiments, the pharmaceutical compositions of the disclosure comprise PBS. In certain embodiments, the pharmaceutical compositions of the disclosure comprise pluronic. In certain embodiments, the pharmaceutical compositions of the disclosure comprise PBS, NaCl and pluronic. In certain embodiments, the vectors are administered by intravitreal injection in a solution of PBS with additional NaCl and pluronic.

[0318] In some embodiments, any of the vectors disclosed herein is capable of inducing at least 20%, 50%, 100%, 150%, 200%, 250%, 300%, 400%, 500%, 700%, 900%, 1000%, 1100%, 1500%, or 2000% higher expression of CFTR, ATP7B, ATP7A, AGL, DMD, or CPS1 in a target cell as compared to the endogenous expression of CFTR, ATP7B, ATP7A, AGL, DMD, or CPS1 in the target cell. In some embodiments, expression of any of the vectors disclosed herein in a target cell results in at least 20%, 50%, 100%, 150%, 200%, 250%, 300%, 400%, 500%, 700%, 900%, 1000%, 1100%, 1500%, or 2000% higher levels of CFTR, ATP7B, ATP7A, AGL, DMD, or CPS1 activity in the target cell as compared to endogenous levels of CFTR, ATP7B, ATP7A, AGL, DMD, or CPS1 activity in the target cell.

[0319] In some embodiments, any of the vectors disclosed herein is administered to cell(s) or tissue(s) in a test subject. In some embodiments, the cell(s) or tissue(s) in the test subject express less CFTR, ATP7B, ATP7A, AGL, DMD, or CPS1, or less functional CFTR, ATP7B, ATP7A, AGL, DMD, or CPS1, than expressed in the same cell type or tissue type in a reference control subject or population of reference control subjects. In some embodiments, the reference control subject is of the same age and/or sex as the test subject. In some embodiments, the reference control subject is a healthy subject, e.g., the subject does not have a disease or disorder of the eye. In some embodiments, the reference control subject does not have a disease or disorder of the eye associated with a mutation in and/or inactivation of a CFTR, ATP7B, ATP7A, AGL, DMD, or CPS1 gene. In some embodiments, the reference control subject does not have cystic fibrosis, Wilson disease, Menkes disease, Cori Disease, Duchenne Muscular Dystrophy, or CPS1D. In some embodiments, a target cell or tissue in the test subject expresses at least 95%, 90%, 80%, 70%, 60%, 50%, 40%, 30%, 20%, 10%, 5%, or 1% less CFTR, ATP7B, ATP7A, AGL, DMD, or CPS1 or functional CFTR, ATP7B, ATP7A, AGL, DMD, or CPS1 as compared to the levels in the reference control subject or population of reference control subjects. In some embodiments, a target cell or tissue in the test subject expresses CFTR, ATP7B, ATP7A, AGL, DMD, or CPS1 protein having any of the mutations disclosed herein. In some embodiments, a target cell or tissue in the reference control subject does not express a CFTR, ATP7B, ATP7A, AGL, DMD, or CPS1 protein having any of the CFTR, ATP7B, ATP7A, AGL, DMD, or CPS1 mutations disclosed herein. In some embodiments, expression of any of the vectors disclosed herein in the cell(s) or tissue(s) of the test subject results in an increase in levels of CFTR, ATP7B, ATP7A, AGL, DMD, or CPS1 protein or functional CFTR, ATP7B, ATP7A, AGL, DMD, or CPS1 protein. In some embodiments, expression of any of the vectors disclosed herein in the cell(s) or tissue(s) of the test subject results in an increase in levels of CFTR, ATP7B, ATP7A, AGL, DMD, or CPS1 protein or functional CFTR, ATP7B, ATP7A, AGL, DMD, or CPS1 protein such that the increased levels are within 90%, 80%, 70%, 60%, 50%, 40%, 30%, 20%, 10%, 5%, or 1% of, or are the same as, the levels of CFTR, ATP7B, ATP7A, AGL, DMD, or CPS1 protein or functional CFTR, ATP7B, ATP7A, AGL, DMD, or CPS1 protein expressed by the same cell type or tissue type in the reference control subject or population of reference control subjects. In some embodiments, expression of any of the vectors disclosed herein in the cell(s) or tissue(s) of the test subject results in an increase in levels of CFTR, ATP7B, ATP7A, AGL, DMD, or CPS1 protein or functional CFTR, ATP7B, ATP7A, AGL, DMD, or CPS1 protein, but the increased levels of CFTR, ATP7B, ATP7A, AGL, DMD, or CPS1 protein or functional CFTR, ATP7B, ATP7A, AGL, DMD, or CPS1 protein do not exceed the levels of CFTR, ATP7B, ATP7A, AGL, DMD, or CPS1 protein or functional CFTR, ATP7B, ATP7A, AGL, DMD, or CPS1 protein expressed by the same cell type or tissue type in the reference control subject or population of reference control subjects. In some embodiments, expression of any of the vectors disclosed herein in the cell(s) or tissue(s) of the test subject results in an increase in levels of CFTR, ATP7B, ATP7A, AGL, DMD, or CPS1 protein or functional CFTR, ATP7B, ATP7A, AGL, DMD, or CPS1 protein, but the increased levels of CFTR, ATP7B, ATP7A, AGL, DMD, or CPS1 protein or functional CFTR, ATP7B, ATP7A, AGL, DMD, or CPS1 protein exceed the levels of CFTR, ATP7B, ATP7A, AGL, DMD, or CPS1 protein or functional CFTR, ATP7B, ATP7A, AGL, DMD, or CPS1 protein by no more than 1%, 5%, 10%, 20%, 25%, 30%, 40%, 50%, 60%, 70%, 80%, 90% or 100% of the levels expressed by the same cell type or tissue type in the reference control subject or population of reference control subjects. In some embodiments, any of the treatment and/or prophylactic methods disclosed herein are applied to a subject. In some embodiments, the subject is a mammal. In some embodiments, the subject is a human. In some embodiments, the human is a newborn, an infant, child, pre-adolescent, adolescent, or adult. In some embodiments, the human is less than 1 week of age, less than 2 weeks of age, less than one month of age, less than two months of age, less than 6 months of age, less than 1 year of age, less than 18 months of age, less than 2 years of age, less than 3 years of age, less than 4 years of age, less than 5 years of age, less than 10 years of age, less than 12 years of age, less than 16 years of age or less than 18 years of age.

### Cystic Fibrosis

[0320] In some embodiments, any of the treatment and/or prophylactic methods disclosed herein is for use in treatment of a patient having one or more mutations in the patient's Cystic Fibrosis Transmembrane Conductance Regulator (CFTR) gene.

[0321] Cystic Fibrosis (CF) is caused by mutations in the cystic fibrosis transmembrane conductance regulator (CFTR) gene which encodes a multi-membrane spanning epithelial chloride channel (Riordan et al., ANNU REV BIOCHEM 77, 701-26 (2008)). Approximately ninety percent of patients have a deletion of phenylalanine (Phe) 508 (ΔF508) on at least one allele. This mutation results in disruption of the energetics of the protein fold leading to degradation of CFTR in the endoplasmic reticulum (ER). The ΔF508 mutation is thus associated with defective folding and trafficking, as well as enhanced degradation of the mutant CFTR protein (Qu et al., J BIOL CHEM 272, 15739-44 (1997)). The loss of a functional CFTR channel at the plasma membrane disrupts ionic homeostasis (Cl−, Na+, HCO3−) and airway surface hydration leading to reduced lung function (Riordan et al.). Reduced periciliary liquid volume and increased mucus viscosity impede mucociliary clearance resulting in chronic infection and inflammation, phenotypic hallmarks of CF disease (Boucher, J INTERN MED 261, 5-16 (2007)). In addition to respiratory dysfunction, ΔF508 CFTR also impacts the normal function of additional organs (pancreas, intestine, gall bladder), suggesting that the loss-of-function impacts multiple downstream pathways that will require correction.

[0322] In addition to cystic fibrosis, mutations in the CFTR gene and/or the activity of the CFTR channel has also been implicated in other conditions, including for example, congenital bilateral absence of vas deferens (CBAVD), acute, recurrent, or chronic pancreatitis, disseminated bronchiectasis, asthma, allergic pulmonary aspergillosis, smoking-related lung diseases, such as chronic obstructive pulmonary disease (COPD), dry eye disease, Sjogren's syndrome and chronic sinusitis, cholestatic liver disease (e.g. Primary biliary cirrhosis (PBC) and primary sclerosing cholangitis (PSC)) (Sloane et al. (2012), PLoS ONE 7(6): e39809.doi:10.1371/journal. pone.0039809; Bombieri et al. (2011), J CYST FIBROS. 10 Suppl 2:S86-102; Albert et al. (2008), CLINICAL RESPIRATORY MEDICINE, Third Ed., Mosby Inc.; Levin et al. (2005), INVEST OPHTHALMOL VIS SCI., 46(4):1428-34; Froussard (2007), PANCREAS 35(1): 94-5), Son et al. (2017) J Med Chem 60(6):2401-10.

[0323] In some embodiments, CFTR activity is enhanced after administration of a nucleic acid described herein when there is an increase in the CFTR activity as compared to that in the absence of the administration of the nucleic acid. CFTR activity encompasses, for example, chloride channel activity of the CFTR, and/or other ion transport activity (for example, HCO3− transport). CFTR activity can be increased, for example, by at least 20%, at least 30%, at least 40%, at least 50%, at least 60%, at least 70%, at least 80%, at least 90%, at least 95%, or 100% upon administration of the nucleic acid.

[0324] Contemplated patients may carry a CFTR mutation(s) selected from ΔF508, S549N, G542X, G551D, R117H, N1303K, W1282X, R553X, 621+1G>T, 1717-1G>A, 3849+10kbC>T, 2789+5G>A, 3120+1G>A, 1507del, R1162X, 1898+1G>A, 3659delC, G85E, D1152H, R560T, R347P, 2184insA, A455E, R334W, Q493X, E56K, P67L, R74W, D110E, D110H, R117C, G178R, E193K, L206W, R347H, R352Q, A455E, S549R, G551S, D579G, S945L, S997F, F1052V, K1060T, A1067T, G1069R, R1070Q, R1070W, F1074L, G1244E, S1251N, S1255P, D1270N, G1349D, and 2184delA. Contemplated patients may carry a CFTR mutation(s) from one or more classes, such as without limitation, Class I CFTR mutations, Class II CFTR mutations, Class III CFTR mutations, Class IV CFTR mutations, Class V CFTR mutations, and Class VI mutations. TABLE 19 provides a description of each class of mutation.

TABLE 19

| | Effect on | Example of |
|---|---|---|
| Class | CFTR protein | mutation |
| I | Shortened protein | W1282X Instead of inserting the |
| | | amino acid tryptophan (W), the |
| | | protein sequence is prematurely |
| | | stopped (indicated by an X). |
| II | Protein fails to reach | ΔF508 A phenylalanine amino |
| | cell membrane | acid (F) is deleted |
| III | Channel cannot be | G551D A “missense” mutation: |
| | regulated properly | instead of a glycine amino |
| | | acid (G), aspartate (D) is added |
| IV | Reduced chloride | R117H Missense |
| | conductance | |
| V | Reduced due to incorrect | 3120 + 1G > A Splice-site |
| | splicing of gene | mutation in gene intron 16 |
| VI | Reduced due to protein | N287Y a A −> T at 991 |
| | instability | |

[0325] Contemplated subject (e.g., human subject) CFTR genotypes include, without limitation, homozygote mutations (e.g., ΔF508/ΔF508 and R117H/R117H) and compound heterozygote mutations (e.g., ΔF508/G551D; ΔF508/A455E; ΔF508/G542X; Δ508F/W1204X; R553X/W1316X; W1282X/N1303K, 591Δ18/E831X, F508del/R117H/N1303K/3849+10kbC>T; Δ303K/384; and DF508/G178R). TABLE 20 provides further description of selected genotypes.

TABLE 20

| Genotype | Description | Possible Symptoms |
|---|---|---|
| Δ508F/Δ508F | homozygote | Severe lung disease, |
| | | pancreatic insufficient |
| R117H/R117H | homozygote | Congenital bilateral absence |
| | | of the vas deferens, |
| | | No lung or pancreas |
| | | disease, |
| WT/Δ508F | heterozygote | Unaffected |
| WT/3120 + | heterozygote | Unaffected |
| 1 G > A | | |
| Δ508F/W1204X | compound | No lung disease, |
| | heterozygote | pancreatic insufficient |
| R553X and W1316X | compound | Mild lung disease, |
| | heterozygote | pancreatic insufficient |
| 591Δ18/E831X | compound | No lung or pancreas |
| | heterozygote | disease, nasal polyps |

[0326] In certain embodiments, the mutation is a Class I mutation, e.g., a G542X; a Class II/I mutation, e.g., a ΔF508/G542X compound heterozygous mutation. In other embodiments, the mutation is a Class III mutation, e.g., a G551D; a Class II/Class III mutation, e.g., a ΔF508/G551D compound heterozygous mutation. In still other embodiments, the mutation is a Class V mutation, e.g., a A455E; Class II/Class V mutation, e.g., a ΔF508/A455E compound heterozygous mutation.

[0327] Of the more than 1000 known mutations of the CFTR gene, ΔF508 is the most prevalent mutation of CFTR which results in misfolding of the protein and impaired trafficking from the endoplasmic reticulum to the apical membrane (Dormer et al. (2001). J Cell Sci 114, 4073-4081; http://www.genet.sickkids.on.ca/app). In certain embodiments, CFTR activity is enhanced (e.g., increased) following delivery of the nucleic acid to the subject. An enhancement of CFTR activity can be measured, for example, using literature described methods, including for example, Ussing chamber assays, patch clamp assays, and hBE Ieq assay (Devor et al. (2000), AM J PHYSIOL CELL PHYSIOL 279(2): C461-79; Dousmanis et al. (2002), J GEN PHYSIOL 119(6): 545-59; Bruscia et al. (2005), PNAS 103(8): 2965-2971).

[0328] As discussed above, the disclosure also encompasses a method of treating cystic fibrosis. Methods of treating other conditions associated with CFTR activity, including conditions associated with deficient CFTR activity, comprising administering an effective amount of a disclosed nucleic acid, are also provided herein.

[0329] For example, provided herein is a method of treating a condition associated with deficient or decreased CFTR activity comprising administering an effective amount of a disclosed nucleic acid. Non-limiting examples of conditions associated with deficient CFTR activity are cystic fibrosis, congenital bilateral absence of vas deferens (CBAVD), acute, recurrent, or chronic pancreatitis, disseminated bronchiectasis, asthma, allergic pulmonary aspergillosis, smoking-related lung diseases, such as chronic obstructive pulmonary disease (COPD), chronic sinusitis, cholestatic liver disease (e.g. Primary biliary cirrhosis (PBC) and primary sclerosing cholangitis (PSC)), dry eye disease, protein C deficiency, Aβ-lipoproteinemia, lysosomal storage disease, type 1 chylomicronemia, mild pulmonary disease, lipid processing deficiencies, type 1 hereditary angioedema, coagulation-fibrinolyis, hereditary hemochromatosis, CFTR-related metabolic syndrome, chronic bronchitis, constipation, pancreatic insufficiency, hereditary emphysema, and Sjogren's syndrome.

[0330] In some embodiments, disclosed methods of treatment further comprise administering an additional therapeutic agent. For example, in an embodiment, provided herein is a method of administering a disclosed nucleic acid and at least one additional therapeutic agent. In certain aspects, a disclosed method of treatment comprises administering a disclosed nucleic acid, and at least two additional therapeutic agents. Additional therapeutic agents include, for example, mucolytic agents, bronchodilators, antibiotics, anti-infective agents, anti-inflammatory agents, ion channel modulating agents, therapeutic agents used in gene therapy, CFTR correctors, and CFTR potentiators, or other agents that modulates CFTR activity. In some embodiments, at least one additional therapeutic agent is selected from the group consisting of a CFTR corrector and a CFTR potentiator. Non-limiting examples of CFTR correctors and potentiators include VX-770 (Ivacaftor), deuterated Ivacaftor, GLPG2851, GLPG2737, GLPG2451, VX-809 (3-(6-(1-(2,2-difluorobenzo[d][1,3]dioxol-5-yl)cyclopropanecarboxamido)-3-methylpyridin-2-yl)benzoic acid, deuterated lumacaftor, VX-661 (1-(2,2-difluoro-1,3-benzodioxol-5-yl)-N-[1-[(2R)-2,3-dihydroxypropyl]-6-fluoro-2-(2-hydroxy-1,1-dimethylethyl)-1H-indol-5-yl]-cyclopropanecarboxamide), VX-983, VX-152, VX-440, VX-445, VX-659, and Ataluren (PTC124) (3-[5-(2-fluorophenyl)-1,2,4-oxadiazol-3-yl]benzoic acid), FDL169, GLPG1837/ABBV-974 (for example, a CFTR potentiator), GLPG2665, GLPG2222 (for example, a CFTR corrector); and compounds described in, e.g., WO2014/144860 and 2014/176553, hereby incorporated by reference. Non-limiting examples of modulators include QBW-251, QR-010, NB-124, riociquat, SPX-101, and compounds described in, e.g., WO2014/045283; WO2014/081821, WO2014/081820, WO2014/152213; WO2014/160440, WO2014/160478, US2014027933; WO2014/0228376, WO2013/038390, WO2011/113894, WO2013/038386; and WO2014/180562, of which the disclosed modulators in those publications are contemplated as an additional therapeutic agent and incorporated by reference. Non-limiting examples of anti-inflammatory agents include N6022 (3-(5-(4-(1H-imidazol-1-yl) phenyl)-1-(4-carbamoyl-2-methylphenyl)-¹H-pyrrol-2-yl) propanoic acid), CTX-4430, N1861, N1785, and N91115.

[0331] The phrase “combination therapy,” as used herein, refers to an embodiment where a patient is co-administered a disclosed nucleic acid, and one or more of a CFTR potentiator agent (e.g., ivacaftor GLPG1837, GLPG2545, or GLPG3067) and a CFTR corrector agent(s) (e.g, VX-661, VX-152, VX-440, VX-445, VX659, GLPG2222, GLPG2851, GLPG2737 OR GLPG3221 and/or lumacaftor). Combination therapy is intended to embrace administration of multiple therapeutic agents in a sequential manner, that is, wherein each therapeutic agent is administered at a different time, as well as administration of these therapeutic agents, or at least two of the therapeutic agents, in a substantially simultaneous manner. Sequential or substantially simultaneous administration of each therapeutic agent can be effected by any appropriate route including, but not limited to, oral routes, inhalational routes, intravenous routes, intramuscular routes, and direct absorption through mucous membrane tissues. The therapeutic agents can be administered by the same route or by different routes. For example, a first therapeutic agent of the combination selected may be administered by intravenous injection or inhalation or nebulizer while the other therapeutic agents of the combination may be administered orally. Alternatively, for example, all therapeutic agents may be administered orally or all therapeutic agents may be administered by intravenous injection, inhalation or nebulization.

### Wilson Disease (WD)

[0332] Wilson disease (WD) is an autosomal recessive genetic disorder that causes accumulation of copper primarily in the liver and subsequently in the neurological system and other tissues. WD is a rare disorder that affects approximately 1 in 30,000 individuals, caused by mutations in the copper transporting ATPase 2 (ATP7B) gene on chromosome 13. There are more than 600 unique ATP7B mutations. ATP7B is expressed mainly in hepatocytes and functions in the transmembrane transport of copper. Absent or reduced function of ATP7B protein results in decreased hepatocellular excretion of copper into bile, causing liver disease. Over time without proper treatment, high copper levels can cause life-threatening organ damage.

[0333] Patients with hepatic WD usually present in late childhood or adolescence, and exhibit features of acute hepatitis, fulminant hepatic failure, or progressive chronic liver disease. Neurologic manifestations of WD typically present later than the liver disease, most often in the second or third decade and include extrapyramidal, cerebellar, and cerebral-related symptoms.

[0334] The aim of medical treatment of WD is to remove the toxic deposit of copper from the body and to prevent its reaccumulation. Current treatment approaches for WD are daily oral therapy with chelating agents (D-penicillamine, trientine, and zinc salts). Medical therapy is effective in most, but not all WD patients. Liver transplantation is a therapeutic option in WD patients presenting with fulminant liver failure or progressive liver failure. However, transplant recipients are required to maintain a constant immune suppression regimen to prevent rejection. Further, compliance is a major issue for WD patients, and a single-dose cure would represent a substantial advancement.

[0335] In some embodiments, ATP7B activity is enhanced after administration of a nucleic acid described herein when there is an increase in the ATP7B activity as compared to that in the absence of the administration of the nucleic acid. ATP7B activity encompasses, for example, a decrease in free serum copper, and decrease in total serum copper, a decrease in 24-hour urinary copper, liver copper accumulation, and increase in serum cerulopasmin activity, or a decrease in liver pathology. ATP7B activity can be increased, for example, by at least 20%, at least 30%, at least 40%, at least 50%, at least 60%, at least 70%, at least 80%, at least 90%, at least 95%, or 100% upon administration of the nucleic acid.

[0336] Contemplated subjects include but are not limited to those carrying a G85V, L492S, G591D, A604P, R616W, G710S, P760L, D765N, M769V, L776V, R778Q, R778L, W779X, G943S, R969Q, T997M, V995A, P992L, E1064A, H1069Q, R1115H, and N1270S mutation.

[0337] As discussed above, the disclosure also encompasses a method of treating Wilson disease (WD) comprising administering to a subject a nucleic acid (e.g., a transgene) comprising an ATP7B coding sequence or functional fragment or variant thereof. Methods of treating other conditions associated with ATP7B activity, including conditions associated with deficient ATP7B activity, comprising administering an effective amount of a disclosed nucleic acid, are also provided herein.

[0338] In some embodiments, disclosed methods of treatment further comprise administering an additional therapeutic agent. For example, in an embodiment, provided herein is a method of administering a disclosed nucleic acid and at least one additional therapeutic agent. In certain aspects, a disclosed method of treatment comprises administering a disclosed nucleic acid, and at least two additional therapeutic agents. Additional therapeutic agents include, for example, chelating agents, such as penicillamine and trientine, and drugs to manage copper levels, such as zinc acetate.

### Menkes Disease and Occipital Horn Syndrome (OHS)

[0339] Menkes disease is an infantile onset X-linked recessive neurodegenerative disorder caused by deficiency or dysfunction of the copper-transporting ATPase ATP7A. As an X-linked disease, Menkes disease typically occurs in males who appear normal at birth, but present with loss of previously obtained developmental milestones and the onset of hypotonia, seizures and failure to thrive at 2 to 3 months of age. Characteristic physical changes of the hair and facies, in conjunction with typical neurologic findings, often suggest the diagnosis. The scalp hair of infants with classic Menkes disease is short, sparse, coarse, and twisted. Light microscopy of patient hair illustrates pathognomonic pili torti (for example, 180° twisting of the hair shaft) and the hair tends to be lightly pigmented and may demonstrate unusual colors, such as white, silver, or gray. The face of the individual with Menkes disease has pronounced jowls, with sagging cheeks and ears that often appear large. The palate tends to be high-arched, and tooth eruption is delayed. The skin often appears loose and redundant, particularly at the nape of the neck and on the trunk. Neurologically, profound truncal hypotonia with poor head control is almost invariably present. Developmental skills are confined to occasional smiling and babbling in most patients. Growth failure commences shortly after the onset of neurodegeneration and is asymmetric, with linear growth relatively preserved in comparison to weight and head circumference.

[0340] The biochemical phenotype in Menkes disease involves (1) low levels of copper in plasma, liver, and brain because of impaired intestinal absorption of copper, (2) reduced activities of numerous copper-dependent enzymes, and (3) paradoxical accumulation of copper in certain tissues (such as the duodenum, kidney, spleen, pancreas, skeletal muscle, and/or placenta). The copper-retention phenotype is also evident in cultured fibroblasts and lymphoblasts, in which reduced egress of radiolabeled copper is demonstrable in pulse-chase experiments.

[0341] Mouse models of Menkes disease are available and include the mottled mouse (Mercer, AM. J. CLIN. NUTR. 76:1022S-1028S, 1998; for example, brindled (mo-br), tortoise, dappled, viable-brindled, and/or blotchy (mo-blo) mice) and the macular mouse (e.g. Kodama et al., J. HISTOCHEM. CYTOCHEM. 41:1529-1535, 1993).

[0342] Occipital Hom Syndrome (OHS) is a milder allelic variant of Menkes disease. Serum copper levels are typically slightly below normal levels in OHS patients. OHS is characterized by wedge-shaped calcifications that form at the sites of attachment of the trapezius muscle and the sternocleidomastoid muscle to the occiput (“occipital homs”), which may be clinically palpable and/or visible on radiography. The phenotype of OHS includes slight generalized muscle weakness and dysautonomia (syncope, orthostatic hypotension, and chronic diarrhea). Subjects with OHS also typically have lax skin and joints, bladder diverticula, inguinal hernia, and vascular tortuosity. Intellect is usually normal or slightly reduced. Patients with hepatic WD usually present in late childhood or adolescence, and exhibit features of acute hepatitis, fulminant hepatic failure, or progressive chronic liver disease. Neurologic manifestations of WD typically present later than the liver disease, most often in the second or third decade and include extrapyramidal, cerebellar, and cerebral-related symptoms.

[0343] Contemplated subjects include but are not limited to those carrying a A629P, S637L, R844H, G860V, L873R, G876R, Q924R, C1000R, A1007V, G1015D, G1019D, D1044G, K1282E, G1300E, G1302V, N1304S, N1304K, D1305A, G1315R, A1325V, A1362D, A1362V, G1369R, S1397F mutation.

[0344] In some embodiments, ATP7A activity is enhanced after administration of a nucleic acid described herein when there is an increase in the ATP7A activity as compared to that in the absence of the administration of the nucleic acid. An increase in ATP7A activity can result in, for example, an increased level of copper in plasma, liver, or brain, an increase in activity of a copper-dependent enzymes, a reduction in accumulation of copper in the duodenum, kidney, spleen, pancreas, skeletal muscle, and/or placenta. An increase in ATP7A activity can also be measured in cultured fibroblasts and lymphoblasts by an increased egress of radiolabeled copper in pulse-chase experiments. ATP7A activity can be increased, for example, by at least 20%, at least 30%, at least 40%, at least 50%, at least 60%, at least 70%, at least 80%, at least 90%, at least 95%, or 100% upon administration of the nucleic acid.

[0345] As discussed above, the disclosure also encompasses a method of treating Menkes disease and OHS comprising administering to a subject a nucleic acid (e.g., a transgene) comprising an ATP7A coding sequence or functional fragment or variant thereof. Methods of treating other conditions associated with ATP7A activity, including conditions associated with deficient ATP7A activity, comprising administering an effective amount of a disclosed nucleic acid, are also provided herein.

[0346] In some embodiments, disclosed methods of treatment further comprise administering an additional therapeutic agent. For example, in an embodiment, provided herein is a method of administering a disclosed nucleic acid and at least one additional therapeutic agent. In certain aspects, a disclosed method of treatment comprises administering a disclosed nucleic acid, and at least two additional therapeutic agents. Additional therapeutic agents include, for example, administration of copper therapy by a parenteral (e.g., subcutaneous) route (see, e.g., Kaler et al., N. ENG. J. MED. 358:605-614, 2008; Kaler J. TRACE ELEM. MED. BIOL. 28:427-430, 2014). This additional therapy may be necessary due to defects in copper transport in the gut resulting from ATP7A defects, and leading to low serum copper levels. Thus, in some embodiments, a subject treated with the compositions disclosed herein (for example a subject with reduced serum copper levels, such as a subject having Menkes disease or OHS) is also treated with copper therapy.

[0347] The copper used for treatment may be in any form that can be conveniently administered and having an acceptable level of side effects (such as proximal renal tubular damage). In some examples, copper is in the form of copper histidine, copper histidinate, copper gluconate, copper chloride, and/or copper sulfate. In some examples, the copper is cGMP grade copper, such as cGMP grade copper histidinate. Generally a suitable dose is about 250 μg to about 500 μg of copper (such as copper histidinate, copper chloride, or copper sulfate) per day or every other day. However, other higher or lower dosages (or split doses) also could be used, such as from about 50 μg to about 1000 μg (such as about 50 μg to 200 μg, about 100 μg to 500 μg, about 250 μg to 750 μg, or about 500 μg to 1000 μg) per day or every other day, for example, depending on the subject age (e.g., infant, child, or adult) and body weight, route of administration, or other factors considered by a clinician. In some examples, subjects under 12 months of age are administered the copper in two daily doses, while subjects 12 months of age or older are administered the copper in a single daily dose. Copper therapy is administered by one or more parenteral routes, including, but not limited to subcutaneous, intramuscular, or intravenous administration. In one specific example, copper therapy (such as copper histidinate) is administered by subcutaneous injection.

[0348] The copper can be administered to the subject prior to, simultaneously, substantially simultaneously, sequentially, or any combination thereof, with the ATP7A nucleic acid, vector, recombinant virus, or composition described herein. In some examples, at least one dose of copper is administered within 24 hours of administration of the ATP7A nucleic acid, vector, recombinant virus, or composition described herein. Additional doses of copper can be administered at later times, as selected by a clinician. In some examples, copper therapy is administered daily for at least 3 months, at least 6 months, at least 1 year, at least 2 years, at least 3 years or more (such as about 3 months to 5 years, 6 months to 3 years, 1 to 2 years, 2 to 6 years, or 1 to 5 years). Copper therapy (such as daily administration of copper) may begin immediately upon diagnosis of a subject with an ATP7A-related copper transport disorder and in some examples may occur prior to administration of the ATP7A nucleic acid, vector, recombinant virus, or composition described herein, and also continue daily following ATP7A nucleic acid administration. One of ordinary skill in the art can also select additional treatments for subjects with an ATP7A-related copper transport disorder, such as L-threo-dihydroxyphenylserine (L-DOPS, also known as droxidopa).

[0349] In some embodiments, the effectiveness of treatment of a subject with an ATP7A or an ATP7B nucleic acid as disclosed herein is evaluated by determining one or more biochemical markers of copper metabolism in a sample from a subject (such as serum or CSF copper level, serum ceruloplasmin level, plasma or CSF catecholamine levels, or cellular copper egress). Methods of detecting these biochemical markers of copper metabolism are well known in the art.

[0350] In some examples, a value for a biochemical marker of copper metabolism (such as copper level, ceruloplasmin level, catecholamine level, or cellular copper egress) in a sample from a subject is compared to a value for the same marker from a control (such as a reference value, a control population, or a control individual). In some examples, a control is a subject with untreated ATP7A- or ATP7B-related copper transport disorder (or a reference value or a control population with untreated ATP7A- or ATP7B-related copper transport disorder). In other examples, a control is a healthy subject (such as a subject that does not have a copper transport disorder) or a reference value or healthy control population. In some examples, the control may be samples or values from the subject with the ATP7A- or ATP7B-related copper transport disorder, for example, prior to commencing treatment.

[0351] One biochemical marker of copper metabolism is the level of copper in a sample from a subject (such as serum, plasma, or CSF). In some examples, reduced copper level as compared to a normal control individual or normal control population is a marker of Menkes disease or OHS. Methods of determining copper levels in a sample (such as serum, plasma, or CSF from a subject) are well known to one of skill in the art. In some examples, methods for determining copper levels in a sample include flame atomic absorption spectrometry, anodic stripping voltammetry, graphite furnace atomic absorption, electrothermal atomic absorption spectrophotometry, inductively coupled plasma-atomic emission spectroscopy, and inductively coupled plasma-mass spectrometry. See, e.g. Evenson and Warren, CLIN. CHEM. 21:619-625, 1975; Weinstock and Uhlemann, CLIN. CHEM. 27:1438-1440, 1981; WO 93/017321.

[0352] Ceruloplasmin is the major copper-carrying protein in the blood. This protein has ferroxidase and amine oxidase activity and catalyzes the enzymatic oxidation of p-phenylenediamine (PPD) and Fe(II). Levels of ceruloplasmin in a sample from a subject (such as serum, plasma, or CSF) are a biochemical marker of copper metabolism. In some examples, reduced ceruloplasmin level as compared to normal control sample or population or a reference value is a marker of Menkes disease or OHS.

[0353] Methods of determining ceruloplasmin levels in a sample (such as serum, plasma, or CSF) are well known to one of skill in the art. In one example, ceruloplasmin levels in a sample are determined by measuring ceruloplasmin oxidase activity (such as PPD-oxidase activity or ferroxidase activity). See, e.g., Sunderman and Nomoto, CLIN. CHEM. 16:903-910, 1970). The rate of formation of oxidation product is proportional to the concentration of serum ceruloplasmin (with a correction for non-enzymatic oxidation of substrate). In another example, ceruloplasmin levels in a sample are determined by immunoassay, such as ELISA, dissociation-enhanced time-resolved fluoroimmunoassay, or turbidimetric immunoassay (see, e.g., U.S. Pat. Nos. 6,806,044; 6,010,903; 5,491,066). In a further example, ceruloplasmin levels are determined by purifying ceruloplasmin and analyzing the copper content using inductively coupled plasma mass spectroscopy to provide a copper ion specific signal; and the sample is evaluated for ceruloplasmin based on the copper ion specific signal (see, e.g., U.S. Pat. Publication No. 2007/0161120).

### Cori Disease

[0354] Glycogen Storage Disease type III, or Cori Disease (also Forbes Disease), is caused by a deficiency in glycogen debrancher enzymes, leading to abnormally structured glycogen accumulates in the liver, skeletal and cardiac muscles. Initial presentation occurs at a young age and commonly involves hepatomegaly, fasting hypoglycemia and hyperlipidemia. Despite dietary modifications, progressive liver disease often results in progressive liver fibrosis leading to cirrhosis, with the risk of developing hepatocellular carcinoma and/or liver failure. Long-term complications may also involve dilative cardiomyopathy or life-threatening arrhythmias and death.

[0355] Over 120 pathogenic mutations or likely pathogenic mutations in AGL have been identified for Cori Disease. There are estimated to be ˜10,000 patients worldwide.

[0356] Cori Disease patients may suffer from skeletal myopathy, cardiomyopathy, cirrhosis of the liver, hepatomegaly, hypoglycemia, short stature, dyslipidemia, slight mental retardation, facial abnormalities, and/or increased risk of osteoporosis (Ozen et al. (2007) WORLD J GASTROENTEROL, 13(18): 2545-46). Forms of Cori Disease with muscle involvement may present muscle weakness, fatigue and muscle atrophy. Progressive muscle weakness and distal muscle wasting frequently become disabling as the patients enter the third or fourth decade of life, although this condition has been reported to begin in childhood in many Japanese patients.

[0357] In certain embodiments, “treatment” of Cori Disease encompasses a complete reversal or cure of the disease, or any range of improvement in conditions and/or adverse effects attributable to Cori Disease. Merely to illustrate, treatment of Cori Disease includes an improvement in any of the following effects associated with Cori Disease or combination thereof: skeletal myopathy, cardiomyopathy, cirrhosis of the liver, hepatomegaly, hypoglycemia, short stature, dyslipidemia, failure to thrive, mental retardation, facial abnormalities, osteoporosis, muscle weakness, fatigue and muscle atrophy. Treatment may also include one or more of reduction of abnormal levels of cytoplasmic glycogen, decrease in elevated levels of one or more of alanine transaminase, aspartate transaminase, alkaline phosphatase, or creatine phosphokinase, such as decrease in such levels in serum. Improvements in any of these conditions can be readily assessed according to standard methods and techniques known in the art. Other symptoms not listed above may also be monitored in order to determine the effectiveness of treating Cori Disease. The population of subjects treated by the method of the disease includes subjects suffering from the undesirable condition or disease, as well as subjects at risk for development of the condition or disease.

[0358] In some embodiments, AGL activity is enhanced after administration of a nucleic acid described herein when there is an increase in the AGL activity as compared to that in the absence of the administration of the nucleic acid. An increase in AGL activity can result in, for example, (1) an improvement in one or more of skeletal myopathy, cardiomyopathy, cirrhosis of the liver, hepatomegaly, hypoglycemia, short stature, dyslipidemia, failure to thrive, mental retardation, facial abnormalities, osteoporosis, muscle weakness, fatigue and muscle atrophy and/or (2) a reduction in abnormal levels of cytoplasmic glycogen and/or a decrease in elevated levels of one or more of alanine transaminase, aspartate transaminase, alkaline phosphatase, or creatine phosphokinase, such as decrease in such levels in serum. AGL activity can be increased, for example, by at least 20%, at least 30%, at least 40%, at least 50%, at least 60%, at least 70%, at least 80%, at least 90%, at least 95%, or 100% upon administration of the nucleic acid.

[0359] Contemplated subjects include but are not limited to those carrying a V109L, W248, W461, R494H, R524H, R578S, L620Vfs, K819fs, R910, Y969Lfs, E1072Dfs, Q1159fs, Q1162, Q1209, R1272fs, K1302fs, W1327, and Y1510 mutations.

[0360] In addition, a nucleic acid (e.g., a transgene) comprising an AGL coding sequence or a functional fragment or variant thereof as described herein can be administered alone or in combination with one or more additional compounds or therapies for treating Cori Disease. For example, one or more nucleic acids can be co-administered in conjunction with one or more therapeutic compounds. When co-administration is indicated, the combination therapy may encompass simultaneous or alternating administration. In addition, the combination may encompass acute or chronic administration. Optionally, the nucleic acids of the present disclosure and additional compounds act in an additive or synergistic manner for treating Forbes-Cori Disease. Additional compounds to be used in combination therapies include, but are not limited to, small molecules, polypeptides, antibodies, antisense oligonucleotides, and siRNA molecules.

[0361] In another example of combination therapy, a nucleic acid of the disclosure can be used as part of a therapeutic regimen combined with one or more additional treatment modalities. By way of example, such other treatment modalities include, but are not limited to, dietary therapy, occupational therapy, physical therapy, ventilator supportive therapy, massage, acupuncture, acupressure, mobility aids, assistance animals, and the like. Current treatments of Cori disease include diets high in carbohydrates and cornstarch alone or with gastric tube feedings. Patients having myopathy also are traditionally fed high-protein diets. The nucleic acids of the present disclosure may be administered in conjunction with these dietary therapies. In other embodiments, the methods of the disclosure reduce the need for the patient to be on the dietary regimen.

[0362] In certain embodiments, one or more nucleic acids of the present disclosure can be administered prior to or following a liver transplant.

[0363] Note that although the nucleic acids described herein can be used in combination with other therapies, in certain embodiments, a nucleic acid is provided as the sole form of therapy.

### Duchenne Muscular Dystrophy (DMD)

[0364] Duchenne muscular dystrophy (DMD) is a severe type of muscular dystrophy that primarily affects boys. Muscle weakness usually begins around the age of four, and worsens quickly. Muscle loss typically occurs first in the thighs and pelvis followed by the arms. This can result in trouble standing up. Most are unable to walk by the age of 12. Affected muscles may look larger due to increased fat content. Scoliosis is also common. Some may have intellectual disability. Females with a single copy of the defective gene may show mild symptoms.

[0365] The disorder is X-linked recessive. About two thirds of cases are inherited from a person's mother, while one third of cases are due to a new mutation. It is caused by a mutation in the gene for the protein dystrophin. Dystrophin is important to maintain the muscle fiber's cell membrane. Genetic testing can often make the diagnosis at birth. Those affected also have a high level of creatine kinase in their blood.

[0366] Although there is no known cure, physical therapy, braces, and corrective surgery may help with some symptoms. Assisted ventilation may be required in those with weakness of breathing muscles. Medications used include steroids to slow muscle degeneration, anticonvulsants to control seizures and some muscle activity, and immunosuppressants to delay damage to dying muscle cells.

[0367] DMD affects about one in 3,500 to 6,000 males at birth. It is the most common type of muscular dystrophy. The average life expectancy is 26; however, with excellent care, some may live into their 30s or 40s. The disease is much more rare in girls, occurring approximately once in 50,000,000 live female births.

[0368] Contemplated subjects include but are not limited to those carrying a deletion, e.g., a deletion of one or more exons, a duplication (e.g., a duplication of one or more whole exons), an a point mutation.

[0369] In some embodiments, DMD activity is enhanced after administration of a nucleic acid described herein when there is an increase in the DMD activity as compared to that in the absence of the administration of the nucleic acid. An increase in DMD activity can result in, for example, improved muscle strength and/or tone, increase in muscle size, improvement in cardiomyopathy, lowered serum creatine kinase, and/or improved respiration. DMD activity can be increased, for example, by at least 20%, at least 30%, at least 40%, at least 50%, at least 60%, at least 70%, at least 80%, at least 90%, at least 95%, or 100% upon administration of the nucleic acid.

[0370] As discussed above, the disclosure also encompasses a method of treating DMD comprising administering to a subject a nucleic acid (e.g., a transgene) comprising an DMD coding sequence or functional fragment or variant thereof. Methods of treating other conditions associated with DMD activity, including conditions associated with deficient DMD activity, comprising administering an effective amount of a disclosed nucleic acid, are also provided herein.

[0371] In some embodiments, disclosed methods of treatment further comprise administering an additional therapeutic agent. For example, in an embodiment, provided herein is a method of administering a disclosed nucleic acid and at least one additional therapeutic agent. In certain aspects, a disclosed method of treatment comprises administering a disclosed nucleic acid, and at least two additional therapeutic agents. Additional therapeutic agents include, for example, eteplirsen (Exondys 51), deflazacort (Emfaza), prednisone, and golodirsen (Vyondys 53).

[0372] In some embodiments, the effectiveness of treatment of a subject with a DMD nucleic acid as disclosed herein is evaluated by determining one or more of muscle strength and/or tone, muscle size, cardiomyopathy, serum creatine kinase, and/or respiration using methods known in the art.

### Carbamoyl Phosphate Synthetase I Deficiency (CPS1D)

[0373] Carbamoyl phosphate synthetase I deficiency (CPS1D) is a rare, severe disorder of urea cycle metabolism. There are 2 main forms: (i) a lethal neonatal type characterized by severe hyperammonemia, manifesting in newborns with lethargy, vomiting, hypothermia, seizures, coma and death, and (ii) a typically milder and less severe, delayed-onset type.

[0374] CPS1D is a genetic disorder caused by mutations in the CPS1 gene and is inherited in an autosomal recessive fashion. The CPS1 gene encodes carbamoyl-phosphate synthase I (CPS1), an enzyme located in the mitochondrial matrix of hepatocytes and epithelial cells of intestinal mucosa, and controls the first step of the urea cycle where ammonia is converted into carbamoyl-phosphate. Mutations in this gene lead to an interruption in the urea cycle such that excess nitrogen is not converted to urea for excretion by the kidneys, leading to hyperammonemia. Patients with CPS1D can exhibit aminoaciduria (high urine amino acid levels), episodic ammonia intoxication, hyperammonemia (high blood ammonia levels), hypoarginemia (low blood arginine levels), and/or muscular hypotonia (low or weak muscle tone).

[0375] Contemplated subjects include but are not limited to those carrying a A43V, G58D, S65F, V71G, G79E, P87S, Y87S, Y89D, S123F, D165G, Y212N, D224V, R233C, H243P, G258E, G263E, K280N, G301E, A304V, G317E, H337R, N355D, D358H, P382L, Y389C, L390R, G401R, G431R, G432V, A438T, A438P, K450E, V457G, T471N, A498P, V531E, V531G, T544M, R587C, R587H, R587L, A589T, G593R, S597L, V622M, G628D, 1632R, R638P, A640S, C648Y, E651K, D654V, N674I, N674K, Q678P, N698S, N716K, R718K, R721Q, A724P, A726T, D767V, P774L, R780H, M7921, R803S, R803G, pR803C, F805L, F805S, Q810R, R814W, C816R, L843S, R850C, R850H, K875E, G911E, G911V, S913L, D914H, D914G, S918P, R932T, A949T, L958P, Y959C, Y962C, V978E, G982S, G982D, G982V, Y984H, 1986T, G987C, F992S, S998F, N1016S, P1017L T10221, E1034G, H1045R, 11054R, Q1059R, A1065E, R1089C, R1089L, Q1103R, V1141G, A1155E, A1155V, H1195P, S1203P, S1203L, D1205N, I1215V, R1228Q, N1241K, E1255D, R1262Q, R1262P, D1274H, C1327R, S1331P, G1333E, R1371L, A1378T, L1381S, T1391M, L1398V, P1411L, P1439L, T1443A, R1453W, R1453Q, P1462R, Y1491H, Q44X, Y89X, Y140X, R238X, Q375X, Q478X, E539X, Y590X, R721X, R787X, Q965X, Y1031X, W1106X, R1174X, R1262X, K42RfsX15, D52LfsX3, S137IfsX2, G177RfsX25, L234CfsX2, L244X, E283GfsX16, K287RfsX12, P289HfsX10, G301EfsX24, K399EfsX22, P464CfsX7, N472QfsX2, V474EfsX15 (Donor splice site error), G510AfsX5, A613FfsX25 (Acceptor splice site error), H659TfsX22, A613VfsX20 (Donor splice site error), A717AfsX28, A724PfsX27, L725WfsX19, L743X, K751RfsX42, C761X, R780VfsX13, G802VfsX19, E832VfsX5, E832KfsX9, A907PfsX25, L933X, I937PfsX5, Y959CfsX9, Y962SfsX11 (Donor splice site error), E966AfsX27, C1015WfsX4, N1062TfsX38, N1113WfsX10 (Acceptor splice site error), E1114DX, K1120VfsX25, H1162TfsX5, R1228FfsX24, E1290DfsX12, D1322AfsX5, I1324HfsX5, I1324PfsX3, Q1368SfsXl7, N1383MfsX44, Q1468SfsX8, L1426X (Donor splice site error), V1469IfsX2 mutation. Contemplated subjects also include, but are not limited to, those carrying a genomic change as follows, wherein nucleotide numbers correspond to the reference cDNA sequence NG_008285.1 from GenBank giving the +1 value to the A of the ATG translation initiation codon: c.236+6T>C (mRNA change not determined); c.306_311dupGAATGG; c.471+1G>A (c.382_271delExon4); c.529-3T>G (mRNA change not determined); c.622-7A>G (c.621_622insTGGCAG); (No DNA change identified) c.622_711delExon7; c.711+1G>A (c.622_711delExon7); c.711+686_1164+136del4260 (c.712-1086delExons 8-10); c.840G>C (c.832_840delGTCAGAAAG); c.1087-1G>T (mRNA change not determined); c.1164+1G>A (c.1087_1164delExon11); c.1263+5G>C (c.1165-1263delExon12); c.2895+1G>A (c.2830_2895delExon23); c.2995_2997delAGT; c.3036_3038delGGT; c.3159_3161delCAT; c.3558+1G>C (c.3481_3558delExon29); c.3559-2A>G (c.3559_3666delExon30); c.3756+1G>A (c.3667-3756delExon31); and c.4088_4099del12; c.4101+2T>C (c.4003_4101delExon34+c.4101_4102ins42).

[0376] In some embodiments, CPS1 activity is enhanced after administration of a nucleic acid described herein when there is an increase in the CPS1 activity as compared to that in the absence of the administration of the nucleic acid. An increase in CPS1 activity can result in, for example, (1) a decrease in urine amino acid levels, frequency of episodic ammonia intoxication, and/or blood ammonia levels, or (2) an increase in blood arginine levels and/or muscle tone.

[0377] As discussed above, the disclosure also encompasses a method of treating CPS1D comprising administering to a subject a nucleic acid (e.g., a transgene) comprising an CPS1 coding sequence or functional fragment or variant thereof. Methods of treating other conditions associated with CPS1 activity, including conditions associated with deficient CPS1 activity, comprising administering an effective amount of a disclosed nucleic acid, are also provided herein. CPS1 activity can be increased, for example, by at least 20%, at least 30%, at least 40%, at least 50%, at least 60%, at least 70%, at least 80%, at least 90%, at least 95%, or 100% upon administration of the nucleic acid.

[0378] In some embodiments, disclosed methods of treatment further comprise administering an additional therapeutic agent. For example, in an embodiment, provided herein is a method of administering a disclosed nucleic acid and at least one additional therapeutic agent. In certain aspects, a disclosed method of treatment comprises administering a disclosed nucleic acid, and at least two additional therapeutic agents. Additional therapeutic agents include, for example, glycerol phenylbutrate.

[0379] In some embodiments, the effectiveness of treatment of a subject with a CPS1 nucleic acid as disclosed herein is evaluated by determining one or more of urine amino acid levels, frequency of episodic ammonia intoxication, blood ammonia levels, blood arginine levels and/or muscle tone. Methods of detecting these biochemical markers and/or phenotypes of urea metabolism are well known in the art.

### IX. Kits

[0380] In some embodiments, any of the vectors disclosed herein is assembled into a pharmaceutical or diagnostic or research kit to facilitate their use in therapeutic, diagnostic or research applications. A kit may include one or more containers housing any of the vectors disclosed herein and instructions for use.

[0381] The kit may be designed to facilitate use of the methods described herein by researchers and can take many forms. Each of the compositions of the kit, where applicable, may be provided in liquid form (e.g., in solution), or in solid form, (e.g., a dry powder). In certain cases, some of the compositions may be constitutable or otherwise processable (e.g., to an active form), for example, by the addition of a suitable solvent or other species (for example, water or a cell culture medium), which may or may not be provided with the kit. As used herein, “instructions” can define a component of instruction and/or promotion, and typically involve written instructions on or associated with packaging of the disclosure. Instructions also can include any oral or electronic instructions provided in any manner such that a user will clearly recognize that the instructions are to be associated with the kit, for example, audiovisual (e.g., videotape, DVD, etc.), Internet, and/or web-based communications, etc. The written instructions may be in a form prescribed by a governmental agency regulating the manufacture, use or sale of pharmaceuticals or biological products, which instructions can also reflects approval by the agency of manufacture, use or sale for animal administration.

[0382] Throughout the description, where compositions are described as having, including, or comprising specific components, or where processes and methods are described as having, including, or comprising specific steps, it is contemplated that, additionally, there are compositions of the present invention that consist essentially of, or consist of, the recited components, and that there are processes and methods according to the present invention that consist essentially of, or consist of, the recited processing steps.

[0383] In the application, where an element or component is said to be included in and/or selected from a list of recited elements or components, it should be understood that the element or component can be any one of the recited elements or components, or the element or component can be selected from a group consisting of two or more of the recited elements or components.

[0384] Further, it should be understood that elements and/or features of a composition or a method described herein can be combined in a variety of ways without departing from the spirit and scope of the present invention, whether explicit or implicit herein. For example, where reference is made to a particular compound, that compound can be used in various embodiments of compositions of the present invention and/or in methods of the present invention, unless otherwise understood from the context. In other words, within this application, embodiments have been described and depicted in a way that enables a clear and concise application to be written and drawn, but it is intended and will be appreciated that embodiments may be variously combined or separated without parting from the present teachings and invention(s). For example, it will be appreciated that all features described and depicted herein can be applicable to all aspects of the invention(s) described and depicted herein.

[0385] It should be understood that the expression “at least one of” includes individually each of the recited objects after the expression and the various combinations of two or more of the recited objects unless otherwise understood from the context and use. The expression “and/or” in connection with three or more recited objects should be understood to have the same meaning unless otherwise understood from the context.

[0386] The use of the term “include,” “includes,” “including,” “have,” “has,” “having,” “contain,” “contains,” or “containing,” including grammatical equivalents thereof, should be understood generally as open-ended and non-limiting, for example, not excluding additional unrecited elements or steps, unless otherwise specifically stated or understood from the context.

[0387] Where the use of the term “about” is before a quantitative value, the present invention also includes the specific quantitative value itself, unless specifically stated otherwise. As used herein, the term “about” refers to a ±10% variation from the nominal value unless otherwise indicated or inferred.

[0388] It should be understood that the order of steps or order for performing certain actions is immaterial so long as the present invention remain operable. Moreover, two or more steps or actions may be conducted simultaneously.

[0389] The use of any and all examples, or exemplary language herein, for example, “such as” or “including,” is intended merely to illustrate better the present invention and does not pose a limitation on the scope of the invention unless claimed. No language in the specification should be construed as indicating any non-claimed element as essential to the practice of the present invention.

### EXAMPLES

[0390] The following Examples are merely illustrative and are not intended to limit the scope or content of the invention in any way.

### Example 1. Therapeutic Development of Compact Promoters for CFTR-AAV Gene Therapy

[0391] This Example describes identification and characterization of a promoter that is small, strong, ubiquitous, and endogenous, for adeno-associated virus (AAV) CFTR packaging.

[0392] Bioinformatics analysis revealed the H1 bidirectional promoter appears to be ubiquitously expressed, which is logical given the biology and tissue expression data for both H1-driven genes (H1RNA and PARP-2). Endogenously, the H1 bidirectional promoter expresses an essential RNA gene (H1RNA) involved with tRNA processing and a ubiquitously expressed protein gene (PARP2). While a lack of transgene silencing using the H1 bidirectional promoter is not guaranteed, this result would be consistent with other endogenous mammalian promoters.

[0393] Evolutionary conservation throughout eutherian mammals further supports the presence of a functional genetic control element between the H1RNA and PARP2 genes, and enabled identification of numerous small and compact promoters through gene synteny (FIG. 21A). The orthologous H1 bidirectional promoters tested have all shown promoter activity in human cell lines, as well as cell lines of multiple different species.

[0394] To test the relative strength of the numerous promoter orthologs, a luciferase reporter construct that enables quantitation of RNA polymerase II (pol II) promoter activity was designed. In order to reduce any confounding noise and spurious reporter gene transcription, the plasmid constructs contained 5′ and 3′ beta-globin insulators that flank the expression cassette; the H1 promoter, firefly luciferase, and bGH poly(A) signal were found inside the insulators. It was observed that the pol II promoter activity varied significantly between orthologs, and consequently, the analysis was expanded to over 70 promoters, each tested in multiple human cell lines (FIG. 21B). The constructs were fully-synthesized, sequence verified, and amplified by endotoxin-free maxipreps for transfection studies.

[0395] In order to benchmark the pol II expression levels of these H1 promoters against known promoters, two commonly used promoters were included, the HSK thymidine kinase (TK) promoter and the phosphoglycerate kinase 1 (PGK1) promoter. The TK promoter is 753 basepairs (bp) and known to be a promoter that drives lower expression levels of regulated genes, while PGK1 is 515 bp and known to drive higher expression of regulated genes. The data in FIG. 21B shows the ranked order of promoter activity in HeLa cells with TK (orange, 8th bar from the left) and PGK1 (blue, 1st bar from the right) indicated. FIG. 21B demonstrates a wide range of expression of the H1 promoter orthologs.

[0396] Additionally, the promoter lengths were plotted overlaying the same data with red bars and corresponding to the right Y axis (a non-standard Y-axis range of 150 bp to 250 bp was used to depict the sizes for each promoter clearly). In addition to a range of activity, the promoter sizes were small (between about 150-240 bp) and demonstrated no correlation between size and promoter activity. Indeed, multiple promoters were found in the 150-180 bp size range with significant transcriptional activity. Nine of the promoters were 183 bp (the size of the F5tg83 promoter) or smaller.

[0397] A previous report comparing the promoter activity of the ITR alone (the promoter used in the original CFTR gene therapy trials), against two versions of a minimal TK promoter TK1 (110 bp) and TK2 (102 bp), found that the minimal TK promoters had over 10-fold higher promoter activity (Wang, D. et al., 1999. Efficient CFTR expression from AAV vectors packaged with promoters—the second generation. Gene Ther 6, 667-675.). Additionally, these minimal TK promoters exhibited approximately 25% of the expression of a strong 650 bp CMV immediate-early promoter. Given that these were truncated TK promoters, it would seem reasonable for promoter activity to be reduced compared to the full-length promoter in these experiments. Nevertheless, the full-length TK promoter marked the lower portion of the promoter activity range. Thus, the compact endogenous promoters are likely to be substantially stronger than those previously engineered for AAV-CFTR delivery.

[0398] Key challenges for CFTR gene therapy with AAV are addressed by these novel promoters: they are small and compact, ubiquitously expressed, provide a large range of expression, and are both endogenous and mammalian derived, making them suitable for therapeutic purposes.

### Example 2. CFTR Expression Driven Through Candidate Promoters

[0399] This Example describes a comparison of multiple expression constructs for their capacity to drive CFTR expression in A549 and HEK293 cells, two cell lines that do not endogenously express CFTR. mRNA and protein levels analyses are used to determine both the presence and expression levels resulting initially from plasmid constructs and then subsequently through packaged viruses.

### Promoter Selection

[0400] The most likely explanation for the failure to detect CFTR mRNA in clinical trials is due to the lack of promoter activity. While taking into account length, expression analysis, and other factors, seven candidate promoters are selected based on the reporter assay data previously generated in multiple cell lines, including HEK293. The candidate promoters represent a range of sizes, primarily focusing on those orthologs that are <200 bp. Similarly, the candidate promoters comprise a range of strengths, as determined previously by the luciferase promoter screens in multiple human cell lines (as described in Example 1 above). Additionally, two control promoters—EF1a and F5tg83—are included to provide positive controls for both gene expression and benchmarking levels.

### Plasmid Constructs and Cloning

[0401] The wild-type (WT) CFTR coding sequence are synthesized and cloned downstream of the selected promoters. For initial studies, the short synthetic poly(A) (˜50 nt) terminator sequence is used. These constructs are designed to contain the same expression cassette that would be subsequently be packaged for viral experiments. The constructs also contain flanking NotI restriction sites for cloning into a custom designed plasmid containing flanking AAV2 ITR sequences. A total of ten CFTR plasmid constructs, including positive and negative controls, are synthesized. Following sequencing verification and amplification by endotoxin-free maxipreps, the plasmids are used for transfection studies.

### Plasmid Transfection

[0402] Transfection experiments are conducted in HEK293 and A549 cells, which are cell lines that are readily transfected using lipid-based reagents. The A549 cell line is derived from a lung carcinoma; however, these cells do not endogenously express CFTR. Transfection conditions are tested to ensure that plasmid DNA content correlates with expression. Cells are then sub-cultured for 3-5 passages and seeded into multi-well plates. At 24 hours after seeding, cells are transfected with plasmids using Lipofectamine 3000.

### RT-qPCR

[0403] WT CFTR mRNA expression is determined by RT-qPCR analysis. HEK293 and A549 cell lines do not express CFTR and this absence of endogenous expression simplifies the initial assessment of transgene expression. At 48 hours post transfection, cells are lysed in QuickExtract RNA and treated with DNase I according to the manufacturer's protocol (Lucigen). Cells are treated again with DNase I (Turbo DNase I, Invitrogen) to remove any traces of contaminating DNA, and then samples are column purified (Zymo RNA Clean & Concentrator). RNA is quantitated and between 20 ng-2 μg per sample are used for cDNA synthesis with random primers; all reactions include a minus-reverse transcriptase (RT) control (−RT) (High-Capacity cDNA Reverse Transcription Kit, ThermoFisher). cDNA reactions and −RT controls are then used as templates for qPCR reactions containing CFTR primer-pair probes (ThermoFisher or IDT) and control human GAPDH predesigned primer-pair TaqMan assays (ThermoFisher) with a 2× TaqMan Multiplex Master Mix (ThermoFisher). RT-qPCR analysis is only valid from samples without amplification in the −RT reactions. Following determination of the precise protocol, which encompasses determination of conditions for singleplex and multiplex TaqMan assays, the blinded samples are sent to an external contract research organization and processed according to the numbers as detailed in TABLE 21.

TABLE 21
Summary of processing protocol for RT-qPCR analysis of CFTR plasmids
CFTR RT-qPCR Analysis

| | | Technical | Biological | Cell | Reac- |
|---|---|---|---|---|---|
| Sample | Constructs | Replicates | Replicates | lines | tions |
| −RT | 10 | 1 | 3 | 2 | 60 |
| +RT | 10 | 4 | 3 | 2 | 240 |

### Western Blot

[0404] To determine the protein levels of WT CFTR, western blot analysis in HEK293 cells following methods known in the art are utilized. Briefly, at 48 h post-transfection, cells are lysed in RIPA buffer containing protease inhibitors. 10-30 μg of lysate are run on SDS-PAGE gels (Invitrogen), transferred to PVDF membranes, and probed with antibodies against CFTR (ab596, CFF Antibody Distribution Program) and R-actin as control. Western blot band intensities are then quantified, noting the B band and C band corresponding to the core glycosylated and mature glycosylated forms of CFTR, respectively. In order to reduce the total number of samples, five constructs are chosen, including the two controls for protein analysis and one cell line are analyzed. A summary of the analysis is shown in TABLE 22.

TABLE 22
Summary of processing strategy for protein analysis of CFTR
CFTR Western Blot Analysis

| | | Technical | Biological | Cell | Reac- |
|---|---|---|---|---|---|
| Sample | Constructs | Replicates | Replicates | lines | tions |
| Protein | 5 | 3 | 3 | 1 | 45 |

[0405] Plasmid expression of CFTR as determined by RT-qPCR and western blotting is analyzed to provide an initial assessment of promoter activity and CFTR expression. As described above, over 70 small promoters may be utilized, and replace promoters that may exhibit little or no transcriptional activity. Given that the promoters have previously been tested for activity in HEK293 cells, the existing reporter assay data provide a good starting point for such analysis.

[0406] Detection of expression at this stage would provide a strong rationale for AAV packaging and further experimentation. CFTR expression data is used to select three promoter constructs (plus two controls) to be packaged into AAV vectors for subsequent experiments.

### AAV Packaging

[0407] For the in vitro experiments, the AAV-DJ will be utilized as the viral vector, which exhibits higher in vitro transduction efficiency than other wild-type serotypes (Grimm, D. et al. 2008. In vitro and in vivo gene therapy vector evolution via multispecies interbreeding and retargeting of adeno-associated viruses. J VIROL 82, 5887-5911). Constructs are cloned into ITR-containing plasmids, and small-scale packaging is used to produce virus for initial in vitro transduction analysis. Small scale preparations are produced.

[0408] The process is briefly summarized here: HEK293T cells are used in triple-transfected reactions, with an ITR-containing transfer plasmid, a rep and AAV-DJ serotype-specific cap plasmid, and a helper plasmid encoding the adenoviral sequences. At 72 hours following transfection, cells are collected and subjected to three freeze-thaw cycles to release viral particles. Following centrifugation to remove cell debris, the supernatant is stored at −80° C. Crude lysate will be titered by digital PCR (dPCR) using a known ITR primer and probe combination and quantified on a QuantStudio 3D Digital PCR System (Thermo Scientific).

### AAV Transduction

[0409] AAV transduction is first tested for culture conditions using a control vector. Serial dilutions of packaged AAV-DJ constructs are added to the cell culture media of HEK293 and A549 cells, with multiplicity of infections (MOI) ranging from 1×10³-1×10⁵. After 2 hours, the cells are washed, and media replaced. After 72 hours, transduction efficiency is compared across the range of MOIs using dPCR. Based on the optimized MOI conditions, the five AAV constructs are transduced, and CFTR mRNA and protein expression is quantified at 72 hours post-transduction.

### RT-qPCR

[0410] Following transduction, cells are processed for CFTR mRNA expression, as described above. A summary of the analysis is shown in TABLE 23.

TABLE 23
Summary of processing protocol for RT-qPCR analysis of CFTR mRNA
CFTR RT-qPCR Analysis

| | | Technical | Biological | Cell | Reac- |
|---|---|---|---|---|---|
| Sample | Constructs | Replicates | Replicates | lines | tions |
| −RT | 5 | 1 | 3 | 2 | 30 |
| +RT | 5 | 4 | 3 | 2 | 120 |

### Western Blot

[0411] Following transduction, cells are processed for CFTR protein expression, as described above. A summary of the analysis is shown in TABLE 24.

TABLE 24
Summary of processing strategy for protein analysis of CFTR
CFTR Western Blot Analysis

| | | Technical | Biological | Cell | Reac- |
|---|---|---|---|---|---|
| Sample | Constructs | Replicates | Replicates | lines | tions |
| Protein | 5 | 3 | 3 | 1 | 45 |

[0412] Viral packaging and delivery are essential for therapeutic rescue of deficient CFTR in patients. RT-qPCR and western blot analysis are used for confirmation of the presence of CFTR expression derived from CFTR-AAV constructs.

### Example 3. Analysis of Lead Constructs in AAV-Packaged ALI Cultures

[0413] This Example describes further analysis of two of the candidate CFTR constructs that are first tested in 2D cultures, as described in Example 2 above, under more physiologically relevant, therapeutic conditions.

[0414] Two constructs are assembled with ITR and packaged into AAV6, which is the AAV serotype of greatest potential for therapeutic delivery. These packaged constructs are delivered to CFTR-deficient cells (CFBE4lo−) cultured at an air-liquid interface to best mimic physiological conditions. Transduced cells are assessed for CFTR mRNA expression and functionality, such as transepithelial Cl⁻ transport. CFBE4lo− cells stably expressing a wild-type CFTR minigene (MG) are used as positive controls. AAV6-packaged constructs are then tested in patient-derived nasal epithelial cells to quantify restoration of CFTR expression and function.

### Air-Liquid Interface Cell Cultures.

[0415] CFBE4lo− airway epithelial cells and positive control cells are seeded onto polyester transwell inserts (0.4 μm pore size) that have been precoated with collagen/BSA/fibronectin and differentiated under air-liquid interface (ALI) conditions, as previously described (Sharma, N. et al. 2018. Capitalizing on the heterogeneous effects of CFTR nonsense and frameshift variants to inform therapeutic strategy for cystic fibrosis. PLoS GENET 14). Cells are cultured for approximately 2-4 weeks and evaluated for phenotypic hallmarks of a confluent polarized monolayer, including an increase in transepithelial electrical resistance (approximately 200-600 Ω/cm²), as determined by an epithelial voltohmmeter (EVOM, World Precision Instruments Inc).

### AAV Transduction of CFBE4lo− Cells

[0416] Serial dilutions of packaged AAV6 constructs are added to the apical surface, with MOI ranging from 1×10³-1×10⁵. After 2 hours, the apical surface of cells is washed, and media is replaced. After 2 weeks, transduction efficiency is compared across the range of MOIs. These conditions are also used for subsequent experiments.

### RT-qPCR

[0417] Following transduction, cells are processed for mRNA expression as described for 2D cultures above. mRNA expression is measured at 3 time points after transduction (2, 3, 4 weeks). A summary of the analysis is shown in TABLE 25.

TABLE 25
Summary of processing protocol for RT-qPCR analysis of CFTR mRNA
CFTR RT-qPCR from ALI Culture

| | | Technical | Biological | Time | Reac- |
|---|---|---|---|---|---|
| Sample | Constructs | Replicates | Replicates | Points | tions |
| CFBE41o- − RT | 4 | 1 | 3 | 3 | 36 |
| CFBE41o- + RT | 4 | 3 | 3 | 3 | 108 |

### Transepithelial Chloride Transport

[0418] CFBE4lo− cells that have been polarized under ALI conditions are transduced with AAV6-constructs, as described above. At 4 weeks post-transduction, cell inserts are mounted in an Ussing chamber (P2300, Physiologic Instruments Inc) for quantification of transepithelial Cl⁻ transport. Prior to assessment of Cl⁻ transport, a basolateral to apical chloride ion gradient is established and changes in short-circuit current (ΔIsc) are measured in the presence of 100 μM amiloride (a Na⁺ channel inhibitor) followed by sequential administration of 10 μM forskolin (a CFTR agonist) and 20 μM CFTRinh-172 (a CFTR inhibitor). CFBE4lo− cells possessing a wild-type CFTR minigene are used as a control. A summary of the analysis is shown in TABLE 26.

TABLE 26
Summary of processing strategy for protein analysis of CFTR
Transepithelial Chloride Transport from ALI Culture

| | | Technical | Biological | Time | Reac- |
|---|---|---|---|---|---|
| Sample | Constructs | Replicates | Replicates | Points | tions |
| CFBE41o- | 4 | 4 | 3 | 1 | 48 |

[0419] At the conclusion of these experiments, the lead candidate vector using ALI cultures of the CFBE4lo− cell line (F508Δ/F508Δ) is determined. These same candidate vectors are then tested in primary nasal epithelial cells derived from cystic fibrosis (CF) patients possessing different CFTR mutation profiles and unique genetic backgrounds.

Validation in Primary Nasal Epithelium from CF Patients

[0420] Final in vitro validation and characterization is conducted in primary nasal epithelial cells. While cell lines provide many practical advantages for lead development, including their capacity for indefinite expansion and amenability to both plasmid transfection experiments and virus transduction experiments, immortalization and expansion of cell lines can result in altered karyotypes and phenotypes that may not be reflective of patient-derived cells. Primary patient cells, particularly from clinically relevant tissue, therefore provide the best in vitro model for CFTR expression. Primary nasal epithelial cells can be tested naked or polarized at an air-liquid interface to maintain their hallmark phenotypes, including CFTR expression and chloride transport. Furthermore, these patient-derived cells are amenable to transduction by AAV. Patient-derived cells are used to validate the lead constructs following ALI experiments.

### Collection and Culture of Primary Cells

[0421] Nasal epithelial cells are collected via endoscopy from consenting patients following IRB-approved protocols. Primary cells are collected by brushing the mid-part of the inferior turbinate with interdental brushes. Harvested nasal epithelial cells are expanded and then cultured at an air-liquid interface, as previously described above. Briefly, nasal cells are cultured in DMEM/F-12 media in the presence of 10 μM Y-27632, a ROCK inhibitor, and irradiated fibroblast feeder cells. After 2 passages of expansion, cells are seeded onto transwell inserts and grown to confluence. Differentiation media containing Ultroser G serum substitute without reagent Y is then added for 24 hours. Cells are then maintained at an air-liquid interface by removing media from the apical compartment and providing media to the basal compartment only. The apical surface is washed with PBS to remove any mucus accumulation, and the medium is replaced in the basal compartment every 48 hours.

### AAV Transduction of Primary Nasal Cells

[0422] Transduction conditions established for ALI cultures are utilized for patient-derived cells. Cells from a single patient are divided into 6 wells of a 24-well transwell plate, with 2 wells being used for each of the two lead CFTR-AAV6 constructs and 2 wells serving as untransduced controls. CFTR-AAV6 constructs are added in duplicate to the apical surface at the optimized MOI. After 2 hours, the apical surface of cells is washed, and media is replaced. Cells are maintained until harvesting for experimental endpoints as described below. Cells from three patients, each with unique CFTR mutation profiles, are independently cultured and transduced. Replicates are used for CFTR expression and function, as further described below.

### RT-qPCR

[0423] At 4 weeks post-transduction, cells are processed for mRNA expression as described above for 2D cultures. A summary of the analysis is shown in TABLE 27.

TABLE 27
Summary of processing protocol for RT-qPCR analysis of CFTR mRNA
CFTR RT-qPCR from Primary Nasal Cells

| | | Technical | Biological | Time | Reac- |
|---|---|---|---|---|---|
| Sample | Constructs | Replicates | Replicates | Points | tions |
| −RT | 4 | 1 | 3 | 1 | 12 |
| +RT | 4 | 1 | 3 | 1 | 12 |

### Transepithelial Chloride Transport

[0424] At 4 weeks post-transduction, cell inserts are mounted in an Ussing chamber (P2300, Physiologic Instruments, Inc.) for quantification of transepithelial chloride (Cl⁻) transport, as described above. A summary of the analysis is shown in TABLE 28.

TABLE 28
Summary of Cl⁻ transepithelial transport
following transduction with CFTR AAV
Transepithelial Chloride Transport Analysis from Primary Nasal Cells

| | | Technical | Biological | Time | Reac- |
|---|---|---|---|---|---|
| Sample | Constructs | Replicates | Replicates | Points | tions |
| Nasal | 4 | 1 | 3 | 1 | 12 |
| Cells | | | | | |

### Example 4. Promoter Characterization and In Vivo Expression

[0425] This Example describes three key experiments for assessment of therapeutic potential of the CFTR AAV: (i) further characterization of the promoters in multiple lung cell lines, (ii) demonstration of promoter activity and durability in vivo, and (iii) demonstration of CFTR expression in mice.

### Promoter Characterization in Lung Cell Lines

[0426] A minimum of four technical replicates and three biological replicates per sample are used for luciferase assays, and the assay is performed in three cell lines: (i) CFBE4lo−, (ii) A549, and (iii) Calu-3. Over 75 firefly luciferase expression plasmids (including controls) have been generated. Several additional constructs are generated to provide additional benchmarks against commonly used promoters in the field, including tg83 and F5tg83. The conditions for each cell line are determined separately. This includes cell growth and plating, transfection optimization, and the firefly luciferase:NANOLUC® plasmid concentration. For example, each cell line is subcultured and seeded into 96-well plates 24 hours prior to transfection. On the day of transfection, the firefly luciferase construct is co-transfected with the NANOLUC® control construct using Lipofectamine 3000. At 24 hours post-transfection, plates are sequentially assayed for firefly luciferase and NANOLUC® using the Nano-Glo Dual-Luciferase Reporter Assay System (Promega) by imaging for total luminescence on a plate reader (Biotek); the firefly luminescence signal is normalized to the control NANOLUC® signal in each well. Technical replicates within samples are averaged together to produce a single biological replicate value. To generate a rank-ordered list for each cell line, the mean values between biological replicates are then plotted with error bars indicating the SEM. Following technical condition determination, the blinded samples are shipped and processed according to the numbers given in TABLE 29.

TABLE 29
Summary of luciferase activity following transduction with CFTR AAV
Luciferase Assay

| | | Technical | Biological | Cell | Reac- |
|---|---|---|---|---|---|
| Sample | Constructs | Replicates | Replicates | Lines | tions |
| Cell lysate | 80 | 4 | 3 | 3 | 2,880 |

### In Vivo Promoter Activity

[0427] The CFTR−/− mouse shows no spontaneous lung phenotype, and thus has limited utility as an in vivo model of CF. In addition, CFTR−/− mice exhibit severe intestinal blockage and rupture, resulting in a high rate of postnatal to post-weaning mortality. Nevertheless, there is a large gap from in vitro studies to either ferret or pig models, and therefore an in vivo proof-of-concept experiment in mice would provide a compelling rationale to pursue larger animal models. Instead of trying to rescue a pathology, such as the intestinal defects or rate of mortality observed in CFTR−/− mice, a demonstration of CFTR expression from the lead construct delivered via AAV would provide supporting in vivo data, even in the absence of a phenotypic rescue.

[0428] Due to the ubiquitous expression of the promoters, the tissues targeted are largely dependent on the AAV serotype. The AAV6 serotype has demonstrated an enhanced capacity to transduce ALI cultures of human CF bronchial airway epithelium compared to other serotypes. It has also been demonstrated in the art that the ability to efficiently deliver transgene expression to both upper and lower airways of mice and dramatically improves lung function and survival in a mouse model of Surfactant Protein B deficiency. Another important consideration for AAV6 as a vehicle for transgene delivery in the context of CF is that AAV6 carries a point mutation in its capsid protein that enables it to avoid adhesion to mucus. Thus, there is a strong rationale for using AAV6 as the delivery vehicle for a CFTR gene therapy.

[0429] In order to demonstrate promoter activity, first, in vivo luminescence driven by the candidate promoters is examined. A promoter-Luciferase reporter construct that is flanked by ITR sequences is constructed, packaged into AAV6, and delivered via intranasal administration to mice. A time course of in vivo luciferase imaging provides a direct readout of promoter activity and transgene expression in the lungs of the mice.

### Cloning and AAV6 Virus Production

[0430] Luciferase-AAV reporter constructs are generated comprising two of the lead promoters identified above, as well as a PGK1 positive control promoter. High titer and high-quality AAV vectors are generated using a plasmid transfection method. Using a single step cloning process, the transfer plasmids are constructed by excising the expression cassette used in the initial plasmid experiments with flanking NotI restriction sites, followed by ligating that cassette into a custom designed plasmid containing flanking AAV2 ITR sequences. The resulting transfer plasmids are digested by SmaI and sequenced to verify the expression cassette and ITR integrity. Validated plasmids are then amplified and maxi-prepped to generate sufficient endotoxin-free material for packaging. Packaging is done by triple-transfection of the ITR-containing transfer plasmid, a rep and serotype-specific cap plasmid, and a helper plasmid encoding adenoviral sequences. The AAV6 preps are then purified by iodixanol gradient centrifugation and concentrated. Each vector is subjected to standardized assessments, such as titering determination by droplet digital PCR, endotoxin quantification by the Limulus Amebocyte Lysate gel-clot method, and AAV prep purity and stoichiometric analysis of VP1, VP2 and VP3 capsid proteins by polyacrylamide gel electrophoresis followed by silver staining or SYPRO Red staining. Select preparations are further subjected to negative staining electron microscopy, which enables determination of empty to full vector particles.

[0431] Prior to study onset, 48 wild-type C57BL/6 mice are randomized into four groups (six males and six females per group); two groups comprising the two lead constructs and two groups comprising controls. AAV transduction in the mouse is known to be sexually dimorphic, with greater expression in males along with altered tissue distribution in organs, such as the lung. Accordingly, groups of mice representing equal numbers from both sexes are tested, and data is plotted according to sex. At 8 weeks of age, each group receives a single 50 μl intranasal instillation of either 2×1014 VG/kg AAV6 or sterile PBS. Briefly, intranasal delivery is conducted on anesthetized mice that have been positioned upright with their necks straight and their mouths closed. Small volumes of the test material are pipetted onto the bridge of the nose in a manner that enables the nares to inhale the liquid in an alternating fashion until all of the test material has been aspirated.

### In Vivo Luciferase Activity

[0432] Mice are followed for a total of 32 weeks post-infection (for 14 time points) to comprehensively assess peak luciferase expression and vector durability. Mice are injected intraperitoneally with 75 mg/kg D-luciferin in 100 μL of PBS and placed in the chamber of the imaging system under isoflurane anesthesia. 10 minutes post-injection, luminescent images are acquired (Xenogen IVIS). In vivo luciferase expression enables following the kinetics of expression onset along with quantification of promoter activity without having to sacrifice mice. A control vector driving luciferase expression from the PGK1 promoter is used to compare tissue distribution and expression level. Tissue distribution is examined over time to confirm that expression is not silenced as compared with the PGK1 promoter. Imaging is conducted weekly over the first 8 weeks, followed by imaging at 4-week intervals until up to 32 weeks after vector delivery. A summary of the in vivo experiments is shown in TABLE 30.

TABLE 30
Summary of in vivo luciferase activity
following transduction with CFTR AAV

| | | | | | |
|---|---|---|---|---|---|
| | | Male Mice | Female Mice | Time | Reac- |
| Sample | Groups | per group | per group | Points | tions |

Short-Term in vivo Bioluminescence (1-8 weeks)

| | | | | | |
|---|---|---|---|---|---|
| Mouse | 4 | 6 | 6 | 8 | 384 |
| Lung | | | | | |

Long-Term in vivo Bioluminescence (12-32 weeks)

| | | | | | |
|---|---|---|---|---|---|
| Mouse | 4 | 6 | 6 | 6 | 288 |
| Lung | | | | | |

[0433] It is hypothesized that in order to achieve durable expression, the AAV6 vectors must target dividing cell types (e.g., basal stem cells) and the promoters need to evade the silencing or toxicity that is typical of many viral promoters.

### In Vivo AAV6-CFTR Expression

[0434] In vivo CFTR expression in mice is demonstrated. Data collected heretofore include in vitro promoter activity, in vitro CFTR expression, in vitro AAV transduction to ALI cultures and patient samples, in vitro CFTR functional rescue, and in vivo promoter activity have been demonstrated.

[0435] Prior to study onset, 24 wild-type C57BL/6 mice are randomized into two groups (12 males and 12 females per group), comprising 1 lead construct and a control group. At 8 weeks of age, each group receives a single 50 μl intranasal instillation of either 2×10¹⁴ VG/kg AAV6 or sterile PBS, as described above. Mice (3 males and 3 females per group) are sacrificed at 4- and 8-weeks post-injection. Lungs are perfused through the right ventricle with PBS to remove blood, followed by collection of lung tissue. Lungs are harvested for RT-qPCR and western blot analyses.

### RT-qPCR

[0436] RNA is isolated from lung tissue (using an RNeasy Mini Kit, Qiagen kit, or equivalent). cDNA is generated (High-Capacity cDNA Reverse Transcription Kit, ThermoFisher), followed by expression analysis using qPCR assays specific for hCFTR (transgenic expression), mCFTR (endogenous expression), and mGAPDH. Data are aggregated and plotted according to sex of the mouse, as shown in TABLE 31.

TABLE 31
Summary of processing protocol for RT-qPCR analysis of CFTR mRNA
in vivo CFTR RT-qPCR

| | | Male Mice | Female Mice | Time | Reac- |
|---|---|---|---|---|---|
| Sample | Groups | per group | per group | Points | tions |
| Mouse | 2 | 3 | 3 | 3 | 24 |
| Lung | | | | | |

### Western Blot

[0437] Protein is isolated from lung tissue using RIPA buffer plus protease inhibitors. Tissues are homogenized, and protein is separated from tissue debris via centrifugation. 10-30 μg total protein are analyzed via western blot, as described for the in vitro assays above, and as shown in TABLE 32 below.

TABLE 32
Summary of processing protocol for Western Blot
analysis of CFTR protein
in vivo CFTR Western Blot Analysis

| | | Male Mice | Female Mice | Time | Reac- |
|---|---|---|---|---|---|
| Sample | Groups | per group | per group | Points | tions |
| Mouse | 2 | 3 | 3 | 3 | 24 |
| Lung | | | | | |

[0438] Following the above experiments, in vivo AAV6-CFTR expression from the lead candidate vectors is confirmed. Importantly, this would be the only full-length CFTR AAV therapeutic in development, enabled by the compact promoters discovered as described above.

[0439] Building upon the in vivo data in mice, future experiments will be expression and phenotypic rescue in larger animals (ferrets or pigs), and demonstration of chloride channel function in the nasal epithelia of cystic fibrosis patients in the clinic.

### Example 4: Design of Codon Optimized CFTR Sequences

[0440] Using an RNA structure-based approach, the secondary structure for different CFTR encoding mRNAs is predicted, and stability is assessed based on calculated thermodynamic values. Wild-type CFTR cDNA sequence was found to fold into a structure with significant unpaired nucleotides having a ΔG=−1182.20 kcal/mol. In one example of a structure-codon optimized CFTR sequence, base-pairing was significantly increased and the stability of the mRNA structure was also increased (ΔG=−2904.00 kcal/mol) (FIG. 22).

### Structure-Codon Optimization.

[0441] Based on the outlined criteria, 10 CFTR sequences are optimized based on an iterative RNA-folding and codon optimization/harmonization process, generating sequences representing a range of thermodynamic stability. Strong base-pairing among the first 10 residues are avoided as this is known to affect translation. (Mauger et al. (2009) “mRNA structure regulates protein expression through changes in functional half-life,” Proc Natl Acad Sci USA 116:24075-24083.) Model unstructured UTRs (human β-globin 5′UTR and rabbit β-globin 3′UTR) flank the coding sequence (CDS). Optimized CFTR sequences have the human β-globin 5′UTR and rabbit β-globin 3′UTR appended to the mRNA sequence and computationally refolded to confirm the absence of extensive base-pairing occurring between each optimized sequence and the model UTRs.

### Codon Optimization/Harmonization.

[0442] The coding sequence is optimized for a variety of factors known to affect gene expression and viral gene delivery: codon usage bias, GC content, CpG dinucleotides, mRNA secondary structure, cryptic splicing sites, premature poly(A) sites, RNA instability motifs, AT-rich elements (ARE), and repeat sequences (direct repeat, reverse repeat, and dyad repeat). Codon usage bias are determined using the codon adaptive index (CAI), favoring scores >0.70, and the frequency of optimal codons (FOP) is targeted above 80%. GC content is targeted to between 30-70%, and unfavorable GC peaks are optimized to prolong the half-life of the mRNA. Cis-acting elements, including splice donors/acceptors (GGTAAG, GGTGAT, GTAAAA, GTAAGT), PolyA (AATAAA, ATTAAA, AAAAAAA), destabilizing motifs (ATTTA), AT-rich elements (ATTTTA, ATTTTTA, ATTTTTTA), PolyT (TTTTTT), polymerase slippage sites (GGGGGG, CCCCCC), and internal Kozak sequences (ACCACCATGG, GCCACCATGG) are avoided. Additionally, vectors are analyzed for the presence of stem-loop structures that impact ribosomal binding and stability of mRNA, and antiviral motifs (TGTGT, AACGTT, CGTTCG, AGCGCT, GACGTC, GACGTT) are modified.

### Constructs and Cloning.

[0443] Eight to sixteen constructs including the WT CDS are synthesized (Twist Biosciences) and cloned downstream of a bidirectional promoter and flanked between a human β-globin 5′UTR and rabbit β-globin 3′UTR. These elements are fixed between all tested constructs and the rabbit β-globin 3′UTR is used for RT-PCR analysis. Constructs are maxi-prepped and purified under endotoxin-free conditions.

### RT-qPCR

[0444] In order to assess the effects of optimization on mRNA stability, the half-life of CFTR is determined by RT-qPCR following actinomycin treatment. This assay is performed in A549 cells, which do not endogenously express CFTR. A single primer pair and probes against the rabbit β-globin 3′UTR are designed to standardize detection between all constructs (FIG. 20). RT priming occurs via an oligo(dT) primer, and qPCR detection in the 3′UTR region is designed to avoid potential issues arising from extensive RNA secondary structures within the coding sequences. Cells are sub-cultured for 3-5 passages, then seeded into 96-well plates. At 24h after seeding, cells are transfected with plasmids using Lipofectamine 3000. At 48h post transfection, cells are treated with 2 μM actinomycin D or DMSO at 0, 3, and 6 hours to arrest transcription. At each time point, cells are lysed in QuickExtract RNA and treated with DNase I according to manufacturer's protocol (Lucigen). Cells are treated again with DNase I (Turbo DNase I, Invitrogen) to remove any traces of contaminating DNA, and then purified by column (Zymo RNA Clean & Concentrator). RNA is quantitated and 20 ng-2 μg per sample are used for cDNA synthesis with a poly(T) reverse primer; all reactions include a no RT (−RT) control (High-Capacity cDNA Reverse Transcription Kit, ThermoFisher). cDNA reactions and no RT controls are then used as templates for qPCR reactions containing rabbit β-globin 3′UTR primer-pair probes (custom assays from ThermoFisher or IDT) and control human GAPDH predesigned primer-pair TaqMan assays (ThermoFisher) with a 2× TaqMan Multiplex Master Mix (ThermoFisher). RT-qPCR analysis is only valid from samples without amplification in −RT reactions. Expression and stability of each variant is compared to the wild-type CFTR CDS. Following SOP determination, which includes optimization of singleplex and multiplex TaqMan assays, the blinded samples are shipped and processed according to these numbers:

TABLE 33
Summary of processing protocol for RT-qPCR analysis of CFTR mRNA
CFTR RT-qPCR in A549 Cells

| | | Technical | Biological | Time | Reac- |
|---|---|---|---|---|---|
| Sample | Constructs | Replicates | Replicates | Points | tions |
| −RT | 8 | 1 | 3 | 1 | 24 |
| +RT | 8 | 3 | 3 | 3 | 216 |

[0445] After analyzing the data from these experiments, constructs may be iterated and optimized. For example, the process is repeated for a total of 16 constructs. In addition to transfecting 8 plasmid DNA constructs into cells, T7 in vitro-transcribed mRNA sequences corresponding to each DNA construct will be transfected. Direct transfection of mRNA will be used to determine mRNA stability and translation isolated from plasmid transcription.

### Western Blot.

[0446] To determine the protein levels of WT CFTR, western blot analysis is performed using well-established methods. At 48h post-transfection, cells are lysed in RIPA buffer containing protease inhibitors. 10-30 μg of lysate are run on SDS-PAGE gels (Invitrogen), transferred to PVDF membranes, and probed with antibodies against CFTR (ab596, CFF Antibody Distribution Program) and β-actin. Western blot bands are quantified, noting B band and C band corresponding to the core glycosylated and mature glycosylated forms of CFTR, respectively. In order to reduce the total number of samples, 5 constructs are chosen including the two controls for protein analysis and one cell line will be analyzed.

TABLE 34
Summary of processing protocol for RT-qPCR analysis of CFTR mRNA
CFTR Western Blot Analysis

| | | Technical | Biological | Time | Reac- |
|---|---|---|---|---|---|
| Sample | Constructs | Replicates | Replicates | Points | tions |
| Protein | 8 | 3 | 3 | 1 | 72 |

[0447] Secondary structures could have negative effects on AAV packaging. (Xie, J. et al. (2017) “Short DNA Hairpins Compromise Recombinant Adeno-Associated Virus Genome Homogeneity,” Mol Ther 25:1363-1374.) To rule this out, constructs are cloned into ITR-containing plasmids and small-scale packaging are used to verify that there are no adverse effects. Small scale preps are produced. HEK293T cells are used in triple-transfected reactions, with an ITR-containing transfer plasmid, a rep and serotype-specific cap plasmid, and a helper plasmid encoding adenoviral sequences. 72 hours following transfection, cells are collected and subjected to three freeze-thaw cycles to release viral particles. Following centrifugation to remove cell debris, the supernatant is stored at −80° C. Crude lysate is used to transduce HEK293 cells and RT-qPCR or protein capillary electrophoresis is used to validate expression.

[0448] The promoters, codon optimized CFTR, and terminator are selected based on multiple factors, including construct size and expression level; 3-4 candidates are selected. These candidates are assembled from the individual candidate elements identified above, then are synthesized and cloned as they will exist in their final expression cassettes.

[0449] It is expected that this method will identify optimized individual components for subsequent assembly into an AAV size-suitable construct for validation experiments.

### Example 5. Mouse H1 Promoter Deletion Analysis

[0450] To determine which regions of the mouse H1 promoter were needed for activity, a series of mouse H1 promoter constructs were made and tested. A schematic representation of the mouse H1 promoter deletion constructs is shown in FIG. 23, with the wild-type mouse promoter (p059, SEQ ID NO: 93) shown at the top and seven successive 10 bp deletion constructs shown below. An alignment of the various deletion constructs is provided in FIG. 24. These promoters and variants were used to drive reporters and quantitate expression.

[0451] To test the relative activity of promoters, luciferase reporter constructs were designed that enable quantitation of the Pol II promoter activity of the promoters. To reduce confounding noise and spurious reporter gene transcription, the plasmid constructs contain 5′ and 3′ beta-globin insulators that flank the expression cassette; the promoter sequence connected to a control guide RNA on one side and firefly luciferase on the other side, and bGH poly(A) signal are found inside the insulators.

[0452] Generally, cell lines were subcultured and seeded into 96-well plates 24 hours prior to transfection. On the day of transfection, the firefly luciferase construct was co-transfected with the NANOLUC® control construct using Lipofectamine 3000. At 24 hours post-transfection, plates were sequentially assayed for firefly luciferase and NANOLUC® using the Nano-Glo Dual-Luciferase Reporter Assay System (Promega) by imaging for total luminescence on a plate reader (Biotek). For data analysis and plotting, the firefly luminescence signal was normalized to the control NANOLUC® signal in each well. Technical replicates within samples were averaged together to produce a single biological replicate value, and the mean values between biological replicates were then plotted with error bars indicating the SEM. Results are shown in FIG. 25 (normalized firefly to NANOLUC® luciferase signal for each construct).

[0453] As shown in FIG. 25, each deletion construct retained a portion of the full-length wild-type H1 promoter activity. It is contemplated that fragments of H1 promoters (e.g., the H1 promoters described herein) that retain activity can be used to express large genes. For example, expression levels of a large gene produced by using a fragment of an H1 promoter may be sufficient, in certain circumstances, to improve symptoms of a disease, such as cystic fibrosis, Wilson disease, Menkes disease, Cori Disease, Duchenne Muscular Dystrophy, or carbamoyl phosphate synthetase I deficiency (CPS1D)).

### Example 6. Mouse H1 Promoter Mutation Analysis

[0454] Seventeen (17) mutation constructs were designed by walking across the promoter in 10 bp increments and replacing the sequence with its reverse complement. A schematic representation of the constructs is shown in FIG. 26 and an alignment of the sequences shown in FIG. 27. Constructs were made and tested as described in Example 5. Results are shown in FIG. 28.

[0455] As shown in FIG. 28, each mutation construct retained a portion of the full-length wild-type H1 promoter activity. It is contemplated that variants of H1 promoters (e.g., the H1 promoters described herein) that retain activity can be used to express large genes. For example, expression levels of a large gene produced by using a variant of an H1 promoter may be sufficient, in certain circumstances, to improve symptoms of a disease, such as cystic fibrosis, Wilson disease, Menkes disease, Cori Disease, Duchenne Muscular Dystrophy, or carbamoyl phosphate synthetase I deficiency (CPS1D)).

### Example 7. Mouse H1 Promoter with Introns

[0456] Twelve (12) different constructs were designed to incorporate introns into the mouse H1 promoter region. Different intron sequences and different insertion locations were used as shown in FIG. 29. Constructs were made and tested as described in Example 5. Results are shown in FIG. 30.

[0457] As shown in FIG. 30, each intron construct retained at least a portion of the full-length wild-type H1 promoter activity. It is contemplated that variants (e.g., intron-containing variants) of H1 promoters (e.g., the H1 promoters described herein) that retain activity can be used to express large genes. For example, expression levels of a large gene produced by using a variant of an H1 promoter may be sufficient, in certain circumstances, to improve symptoms of a disease, such as cystic fibrosis, Wilson disease, Menkes disease, Cori Disease, Duchenne Muscular Dystrophy, or carbamoyl phosphate synthetase I deficiency (CPS1D)).

### Example 8. Human and Mouse H1 5′UTR Constructs

[0458] FIG. 31 provides a schematic showing the design of human H1 promoter and variant constructs. As shown in FIG. 31, a construct carrying a human H1 promoter alone, a human H1 promoter with a 9 bp Kozak sequence (GCCGCCACC (SEQ ID NO: 256)), a human H1 promoter with a beta-globin 5′UTR, and a human H1 promoter with a TATA box mutation (TATAA→TCGAA) were designed. An alignment of the sequences is shown in FIG. 32.

[0459] Constructs were made and tested as described in Example 5. Results are shown in FIG. 33.

[0460] As shown in FIG. 33, addition of 5′UTR sequences increased expression from an H1 promoter. Accordingly, such 5′UTR sequences can be used to increase expression from a promoter as described herein (e.g., an H1 promoter).

[0461] H1 5′UTR constructs also were made and tested using the mouse H1 promoter, as shown in FIGS. 34 and 35. Results are shown in FIG. 36.

[0462] As shown in FIG. 36, most of the tested 5′UTR sequences increased expression from a mouse H1 promoter. Accordingly, such 5′UTR sequences can be used to increase expression from a promoter as described herein (e.g., a mouse H1 promoter).

### Example 9. Expression of H1, Gar-1 and Other Bidirectional Promoters

[0463] Additional constructs were designed as described above, but using the following promoters: human H1 (p144; SEQ ID NO: 87), mouse H1 (p148; SEQ ID NO: 93), human 7sk-1 (p199; SEQ ID NO: 242), mouse 7sk-1 (p203; SEQ ID NO: 204), human ALOXE3 (p204; SEQ ID NO: 246), human CGB1 (p206; SEQ ID NO: 247), human CGB2 (p207; SEQ ID NO: 248), human GAR1-1 (p216; SEQ ID NO: 107), human Medi6-1 (p222; SEQ ID NO: 249), human Medi6-2 (p223; SEQ ID NO: 250), human SRP (p242; SEQ ID NO: 233).

[0464] Constructs were made and tested as described above. Results are shown in FIG. 37.

[0465] As shown in FIG. 37, most of the tested bidirectional promoters showed increased expression as compared to an H1 promoter. Gar-1 showed the highest level of expression. Accordingly, such compact bidirectional promoters can be used to express a large gene using a vector, such as an AAV vector, that has limited space.

### Example 10. Assessment of Promoter Activity in CF Relevant Cell Lines

[0466] This Example describes the characterization of a library of H1 promoters for their capacity to drive gene expression using luciferase reporters (Firefly luciferase and NANOLUC®) in three lung cell lines (A549, Calu-3, and CFBE4lo−). Normalized luciferase expression was quantified for 71 H1 promoters and benchmarked against a control thymidine kinase (TK) promoter (FIGS. 39, 40, and 41).

[0467] Promoter expression activity was assessed using a luciferase reporter assay. Characterization of the luciferase assay was performed by co-transfecting cells with a plasmid encoding Firefly luciferase and with a plasmid encoding NANOLUC® reporters. The luciferase reporters were under transcriptional control of standard promoters (EF1a, PGK, and TK). A standard curve of the normalized luciferase signal (Firefly signal/NANOLUC® signal) was generated using the following transfection ratios, 90 ng Firefly:10 ng NANOLUC®, 99 ng Firefly:1 ng NANOLUC®, and 100 ng Firefly:0.1 ng NANOLUC® (FIG. 38). Establishing such a ratiometric luciferase reporter assay allowed the determination of promoter expression activity without cross-signal interference.

[0468] A library of 71 H1 promoters was then evaluated for expression activity in three lung cell types (A549, Calu-3, and CFBE4lo−) (FIGS. 39, 40, and 41) and two non-lung cell types (HEK293 and HeLa) used as control samples. Rank-order activity of the compact promoters in the library is shown in FIGS. 39, 40, and 41, along with activity of the standard TK promoter is shown (“TK”). Distributions of expression activity across the three lung cell types is shown in FIG. 42A. Of the 71 compact H1 promoters tested, 59 promoters in Calu-3 cells, 55 promoters in CFBE4lo− cells, and 11 in A549 cells exceeded TK controlled expression of luciferase reporter plasmids. The strongest promoters exceeded TK controlled expression activity by 2.5-8-fold and were only modestly weaker than the two strong standard promoters PGK and EF1a (FIG. 42B). The data suggests that most of the H1 promoters are active in lung cell lines. Furthermore, the promoters in this library do not contain viral or synthetic elements that can have negative consequences stemming from long-range enhancer activity. The data also showed that promoter activity was well-correlated among lung cell lines and across non-lung-cell types (FIG. 43). Hierarchical analysis (complete linkage clustering) was conducted to produce a heatmap as shown in FIG. 44. Through hierarchical analysis, a pattern suggesting that strong promoters in one cell type are likely to be strong promoters in other cell types emerged, enabling the clustering of promoters based on expression activity into six separate clusters (FIG. 44). Cluster 1 included promoters p071, p066, p101, p095, p109, p110, p094, p127, p060, p116, p099, p131, p077, p092, p073, p100, p112, p081, and p098. Cluster 2 included promoters p130, p063, p079, p083, p103, p062, p119, p091, p070, p072, p097, p065, p106, p078, p084, p087, p107, p088, and p102. Cluster 3 included promoter p104. Cluster 4 included promoters p123, p111, and p128. Cluster 5 included promoters p085, p064, and p082. Cluster 6 included promoters p115, p129, p118, p120, p126, p122, p108, p114, p090, p096, p105, p076, p117, p125, p061, p068, p086, p059, p058, p067, p069, p089, p074, p113, p093, and p124. Clusters 3-6 showed higher expression levels above the control TK p322 promoter.

[0469] Following clustering based on expression activity, the top five and bottom five promoters in A549 cells were identified, along with their respective ranking in four other cell types, as shown in TABLE 35.

TABLE 35
The top five and bottom five promoters in A549,
CFBE41o-, Calu-3, HeLa, and HEK293 cells.

| | | | | |
|---|---|---|---|---|
| A549 | CFBE41o- | Calu-3 | HeLa | HEK293 |

Top five promoters

| | | | | | |
|---|---|---|---|---|---|
| p104 | 1 | 1 | 1 | 3 | 5 |
| p123 | 2 | 2 | 5 | 2 | 10 |
| p111 | 3 | 10 | 6 | 7 | 20 |
| p128 | 4 | 24 | 8 | 4 | 11 |
| p118 | 5 | 6 | 31 | 10 | 23 |

Bottom five promoters

| | | | | | |
|---|---|---|---|---|---|
| p087 | 67 | 15 | 62 | 41 | 25 |
| p094 | 68 | 66 | 69 | 69 | 60 |
| p088 | 69 | 67 | 60 | 45 | 54 |
| p127 | 70 | 70 | 70 | 70 | 70 |
| p095 | 71 | 71 | 71 | 71 | 71 |

[0470] Wild type AAV genomes are ˜4.7 kb in length and recombinant AAV can package up to ˜5.2 kb. The DNA required to express full-length CFTR is comprised of the CFTR coding sequence (˜4.4 kb), two inverted terminal repeats (˜0.3 kb), a terminator (˜0.2 kb), and a promoter sequence. By adding the lengths of vector elements, it can be expected that the promoter lengths ≤232 bp may allow for full-length CFTR packaging; some elements, like the terminator sequence, can be further shortened. Given that AAV packaging efficiency may improve with smaller cassettes, a subset of promoters <200 bp was further analyzed and ranked as shown in TABLE 36.

TABLE 36
Ranked expression for ultra-compact (≤200 bp) promoters.
Ranked Expression

| | CFBE41o- | A549 | Calu-3 | HeLa | HEK293 | Size (bp) |
|---|---|---|---|---|---|---|
| p074 | 43 | 13 | 16 | 16 | 13 | 197 |
| p093 | 18 | 19 | 19 | 17 | 1 | 180 |
| p117 | 5 | 35 | 12 | 13 | 46 | 179 |
| p069 | 48 | 37 | 26 | 19 | 4 | 167 |
| p059 | 17 | 40 | 30 | 33 | 42 | 176 |

[0471] The compact promoters described herein are advantageous for their ability to drive expression of large proteins, such as CFTR, while allowing packaging in an AAV vector, circumventing long-standing challenges with AAV vector use for gene therapy applications. Many of the compact promoters described herein show expression levels at least as strong as a TK promoter (see, e.g., FIG. 42B). Further, a subset of the compact promoters described in the preceding example expressed in lung cells (FIG. 42A), a relevant cell type for CFTR gene therapy.

### Example 11. Generation of Ancestral H1 Promoter Sequences

[0472] This example describes the generation of synthetic H1 promoters (SEQ ID NOs: 936-1303) by reconstructing ancestral sequences from the H1 promoters herein described (e.g., SEQ ID NOs: 25-106, 469-476, 559-564, 609-614, 673-678, 681, 692-697, 706-711, 719-724, 729-734, 748-753, 784-789, 904-909, and 920-925).

[0473] First, a phylogenetic tree was built using RAxML or MEGA, as described in A. Stamatakis: “RAxML Version 8: A tool for Phylogenetic Analysis and Post-Analysis of Large Phylogenies” In Bioinformatics, 2014; Nei M. and Kumar S. (2000) Molecular Evolution and Phylogenetics Oxford University Press, New York; Tamura K., Stecher G., and Kumar S. (2021) MEGA 11: Molecular Evolutionary Genetics Analysis Version 11 Molecular Biology and Evolution (on the world wide web at doi.org/10.1093/molbev/msab120); and Stecher G., Tamura K., and Kumar S (2020) Molecular Evolutionary Genetics Analysis (MEGA) for macOS Molecular Biology and Evolution 37:1237-1239, herein incorporated by reference in their entireties.

[0474] For analysis with MEGA, the evolutionary history was inferred by using the Maximum Likelihood method and General Time Reversible model. The tree with the highest log likelihood (−25977.38) was selected. Initial tree(s) for the heuristic search were obtained automatically by applying Neighbor-Join and BioNJ algorithms to a matrix of pairwise distances estimated using the Maximum Composite Likelihood (MCL) approach, and then selecting the topology with superior log likelihood value. A discrete Gamma distribution was used to model evolutionary rate differences among sites (5 categories (+G, parameter=0.9471)). The rate variation model allowed for some sites to be evolutionarily invariable ([+1], 0.30% sites). This analysis involved 408 nucleotide sequences. There were a total of 467 positions in the final dataset. Evolutionary analyses were conducted in MEGA11.

[0475] The phyloFit program from PHAST (Phylogenetic Analysis with Space/Time Models) package was used to generate a phylogenetic model by fitting the tree models to the multiple sequence alignment by maximum likelihood using the HKY85 substitution model. The PREQUEL (Probabilistic REconstruction of ancestral seQUEnces, Largely) program from PHAST was used to compute marginal probability distributions for bases at ancestral nodes in the phylogenetic tree, using the tree model defined by phyloFit. Distributions were computed using the sum-product algorithm, assuming independence of sites. The identified sequences (SEQ ID NOs: 936-1303) correspond to nodes in the original tree.

### INCORPORATION BY REFERENCE

[0476] The entire disclosure of each of the patent and scientific documents referred to herein is incorporated by reference for all purposes.

### EQUIVALENTS

[0477] The invention may be embodied in other specific forms without departing from the spirit or essential characteristics thereof. The foregoing embodiments are therefore to be considered in all respects illustrative rather than limiting on the invention described herein. Scope of the invention is thus indicated by the appended claims rather than by the foregoing description, and all changes that come within the meaning and range of equivalency of the claims are intended to be embraced therein.

SEQUENCE LISTING

>CFTR_WT_CDNA_updated (SEQ ID NO: 1)
ATGCAGAGGTCGCCTCTGGAAAAGGCCAGCGTTGTCTCCAAACTTTTTTTCAGCTGGACCAGACCAATTTTGAGG
AAAGGATACAGACAGCGCCTGGAATTGTCAGACATATACCAAATCCCTTCTGTTGATTCTGCTGACAATCTATCT
GAAAAATTGGAAAGAGAATGGGATAGAGAGCTGGCTTCAAAGAAAAATCCTAAACTCATTAATGCCCTTCGGCGA
TGTTTTTTCTGGAGATTTATGTTCTATGGAATCTTTTTATATTTAGGGGAAGTCACCAAAGCAGTACAGCCTCTC
TTACTGGGAAGAATCATAGCTTCCTATGACCCGGATAACAAGGAGGAACGCTCTATCGCGATTTATCTAGGCATA
GGCTTATGCCTTCTCTTTATTGTGAGGACACTGCTCCTACACCCAGCCATTTTTGGCCTTCATCACATTGGAATG
CAGATGAGAATAGCTATGTTTAGTTTGATTTATAAGAAGACTTTAAAGCTGTCAAGCCGTGTTCTAGATAAAATA
AGTATTGGACAACTTGTTAGTCTCCTTTCCAACAACCTGAACAAATTTGATGAAGGACTTGCATTGGCACATTTC
GTGTGGATCGCTCCTTTGCAAGTGGCACTCCTCATGGGGCTAATCTGGGAGTTGTTACAGGCGTCTGCCTTCTGT
GGACTTGGTTTCCTGATAGTCCTTGCCCTTTTTCAGGCTGGGCTAGGGAGAATGATGATGAAGTACAGAGATCAG
AGAGCTGGGAAGATCAGTGAAAGACTTGTGATTACCTCAGAAATGATTGAAAATATCCAATCTGTTAAGGCATAC
TGCTGGGAAGAAGCAATGGAAAAAATGATTGAAAACTTAAGACAAACAGAACTGAAACTGACTCGGAAGGCAGCC
TATGTGAGATACTTCAATAGCTCAGCCTTCTTCTTCTCAGGGTTCTTTGTGGTGTTTTTATCTGTGCTTCCCTAT
GCACTAATCAAAGGAATCATCCTCCGGAAAATATTCACCACCATCTCATTCTGCATTGTTCTGCGCATGGCGGTC
ACTCGGCAATTTCCCTGGGCTGTACAAACATGGTATGACTCTCTTGGAGCAATAAACAAAATACAGGATTTCTTA
CAAAAGCAAGAATATAAGACATTGGAATATAACTTAACGACTACAGAAGTAGTGATGGAGAATGTAACAGCCTTC
TGGGAGGAGGGATTTGGGGAATTATTTGAGAAAGCAAAACAAAACAATAACAATAGAAAAACTTCTAATGGTGAT
GACAGCCTCTTCTTCAGTAATTTCTCACTTCTTGGTACTCCTGTCCTGAAAGATATTAATTTCAAGATAGAAAGA
GGACAGTTGTTGGCGGTTGCTGGATCCACTGGAGCAGGCAAGACTTCACTTCTAATGGTGATTATGGGAGAACTG
GAGCCTTCAGAGGGTAAAATTAAGCACAGTGGAAGAATTTCATTCTGTTCTCAGTTTTCCTGGATTATGCCTGGC
ACCATTAAAGAAAATATCATCTTTGGTGTTTCCTATGATGAATATAGATACAGAAGCGTCATCAAAGCATGCCAA
CTAGAAGAGGACATCTCCAAGTTTGCAGAGAAAGACAATATAGTTCTTGGAGAAGGTGGAATCACACTGAGTGGA
GGTCAACGAGCAAGAATTTCTTTAGCAAGAGCAGTATACAAAGATGCTGATTTGTATTTATTAGACTCTCCTTTT
GGATACCTAGATGTTTTAACAGAAAAAGAAATATTTGAAAGCTGTGTCTGTAAACTGATGGCTAACAAAACTAGG
ATTTTGGTCACTTCTAAAATGGAACATTTAAAGAAAGCTGACAAAATATTAATTTTGCATGAAGGTAGCAGCTAT
TTTTATGGGACATTTTCAGAACTCCAAAATCTACAGCCAGACTTTAGCTCAAAACTCATGGGATGTGATTCTTTC
GACCAATTTAGTGCAGAAAGAAGAAATTCAATCCTAACTGAGACCTTACACCGTTTCTCATTAGAAGGAGATGCT
CCTGTCTCCTGGACAGAAACAAAAAAACAATCTTTTAAACAGACTGGAGAGTTTGGGGAAAAAAGGAAGAATTCT
ATTCTCAATCCAATCAACTCTATACGAAAATTTTCCATTGTGCAAAAGACTCCCTTACAAATGAATGGCATCGAA
GAGGATTCTGATGAGCCTTTAGAGAGAAGGCTGTCCTTAGTACCAGATTCTGAGCAGGGAGAGGCGATACTGCCT
CGCATCAGCGTGATCAGCACTGGCCCCACGCTTCAGGCACGAAGGAGGCAGTCTGTCCTGAACCTGATGACACAC
TCAGTTAACCAAGGTCAGAACATTCACCGAAAGACAACAGCATCCACACGAAAAGTGTCACTGGCCCCTCAGGCA
AACTTGACTGAACTGGATATATATTCAAGAAGGTTATCTCAAGAAACTGGCTTGGAAATAAGTGAAGAAATTAAC
GAAGAAGACTTAAAGGAGTGCTTTTTTGATGATATGGAGAGCATACCAGCAGTGACTACATGGAACACATACCTT
CGATATATTACTGTCCACAAGAGCTTAATTTTTGTGCTAATTTGGTGCTTAGTAATTTTTCTGGCAGAGGTGGCT
GCTTCTTTGGTTGTGCTGTGGCTCCTTGGAAACACTCCTCTTCAAGACAAAGGGAATAGTACTCATAGTAGAAAT
AACAGCTATGCAGTGATTATCACCAGCACCAGTTCGTATTATGTGTTTTACATTTACGTGGGAGTAGCCGACACT
TTGCTTGCTATGGGATTCTTCAGAGGTCTACCACTGGTGCATACTCTAATCACAGTGTCGAAAATTTTACACCAC
AAAATGTTACATTCTGTTCTTCAAGCACCTATGTCAACCCTCAACACGTTGAAAGCAGGTGGGATTCTTAATAGA
TTCTCCAAAGATATAGCAATTTTGGATGACCTTCTGCCTCTTACCATATTTGACTTCATCCAGTTGTTATTAATT
GTGATTGGAGCTATAGCAGTTGTCGCAGTTTTACAACCCTACATCTTTGTTGCAACAGTGCCAGTGATAGTGGCT
TTTATTATGTTGAGAGCATATTTCCTCCAAACCTCACAGCAACTCAAACAACTGGAATCTGAAGGCAGGAGTCCA
ATTTTCACTCATCTTGTTACAAGCTTAAAAGGACTATGGACACTTCGTGCCTTCGGACGGCAGCCTTACTTTGAA
ACTCTGTTCCACAAAGCTCTGAATTTACATACTGCCAACTGGTTCTTGTACCTGTCAACACTGCGCTGGTTCCAA
ATGAGAATAGAAATGATTTTTGTCATCTTCTTCATTGCTGTTACCTTCATTTCCATTTTAACAACAGGAGAAGGA
GAAGGAAGAGTTGGTATTATCCTGACTTTAGCCATGAATATCATGAGTACATTGCAGTGGGCTGTAAACTCCAGC
ATAGATGTGGATAGCTTGATGCGATCTGTGAGCCGAGTCTTTAAGTTCATTGACATGCCAACAGAAGGTAAACCT
ACCAAGTCAACCAAACCATACAAGAATGGCCAACTCTCGAAAGTTATGATTATTGAGAATTCACACGTGAAGAAA
GATGACATCTGGCCCTCAGGGGGCCAAATGACTGTCAAAGATCTCACAGCAAAATACACAGAAGGTGGAAATGCC
ATATTAGAGAACATTTCCTTCTCAATAAGTCCTGGCCAGAGGGTGGGCCTCTTGGGAAGAACTGGATCAGGGAAG
AGTACTTTGTTATCAGCTTTTTTGAGACTACTGAACACTGAAGGAGAAATCCAGATCGATGGTGTGTCTTGGGAT
TCAATAACTTTGCAACAGTGGAGGAAAGCCTTTGGAGTGATACCACAGAAAGTATTTATTTTTTCTGGAACATTT
AGAAAAAACTTGGATCCCTATGAACAGTGGAGTGATCAAGAAATATGGAAAGTTGCAGATGAGGTTGGGCTCAGA
TCTGTGATAGAACAGTTTCCTGGGAAGCTTGACTTTGTCCTTGTGGATGGGGGCTGTGTCCTAAGCCATGGCCAC
AAGCAGTTGATGTGCTTGGCTAGATCTGTTCTCAGTAAGGCGAAGATCTTGCTGCTTGATGAACCCAGTGCTCAT
TTGGATCCAGTAACATACCAAATAATTAGAAGAACTCTAAAACAAGCATTTGCTGATTGCACAGTAATTCTCTGT
GAACACAGGATAGAAGCAATGCTGGAATGCCAACAATTTTTGGTCATAGAAGAGAACAAAGTGCGGCAGTACGAT
TCCATCCAGAAACTGCTGAACGAGAGGAGCCTCTTCCGGCAAGCCATCAGCCCCTCCGACAGGGTGAAGCTCTTT
CCCCACCGGAACTCAAGCAAGTGCAAGTCTAAGCCCCAGATTGCTGCTCTGAAAGAGGAGACAGAAGAAGAGGTG
CAAGATACAAGGCTTTAG
>CFTR_(deltaR) (SEQ ID NO: 2)
ATGCAGAGGTCGCCTCTGGAAAAGGCCAGCGTTGTCTCCAAACTTTTTTTCAGCTGGACCAGACCAATTTTGAGG
AAAGGATACAGACAGCGCCTGGAATTGTCAGACATATACCAAATCCCTTCTGTTGATTCTGCTGACAATCTATCT
GAAAAATTGGAAAGAGAATGGGATAGAGAGCTGGCTTCAAAGAAAAATCCTAAACTCATTAATGCCCTTCGGCGA
TGTTTTTTCTGGAGATTTATGTTCTATGGAATCTTTTTATATTTAGGGGAAGTCACCAAAGCAGTACAGCCTCTC
TTACTGGGAAGAATCATAGCTTCCTATGACCCGGATAACAAGGAGGAACGCTCTATCGCGATTTATCTAGGCATA
GGCTTATGCCTTCTCTTTATTGTGAGGACACTGCTCCTACACCCAGCCATTTTTGGCCTTCATCACATTGGAATG
CAGATGAGAATAGCTATGTTTAGTTTGATTTATAAGAAGACTTTAAAGCTGTCAAGCCGTGTTCTAGATAAAATA
AGTATTGGACAACTTGTTAGTCTCCTTTCCAACAACCTGAACAAATTTGATGAAGGACTTGCATTGGCACATTTC
GTGTGGATCGCTCCTTTGCAAGTGGCACTCCTCATGGGGCTAATCTGGGAGTTGTTACAGGCGTCTGCCTTCTGT
GGACTTGGTTTCCTGATAGTCCTTGCCCTTTTTCAGGCTGGGCTAGGGAGAATGATGATGAAGTACAGAGATCAG
AGAGCTGGGAAGATCAGTGAAAGACTTGTGATTACCTCAGAAATGATCGAGAACATCCAATCTGTTAAGGCATAC
TGCTGGGAAGAAGCAATGGAAAAAATGATTGAAAACTTAAGACAAACAGAACTGAAACTGACTCGGAAGGCAGCC
TATGTGAGATACTTCAATAGCTCAGCCTTCTTCTTCTCAGGGTTCTTTGTGGTGTTTTTATCTGTGCTTCCCTAT
GCACTAATCAAAGGAATCATCCTCCGGAAAATATTCACCACCATCTCATTCTGCATTGTTCTGCGCATGGCGGTC
ACTCGGCAATTTCCCTGGGCTGTACAAACATGGTATGACTCTCTTGGAGCAATAAACAAAATACAGGATTTCTTA
CAAAAGCAAGAATATAAGACATTGGAATATAACTTAACGACTACAGAAGTAGTGATGGAGAATGTAACAGCCTTC
TGGGAGGAGGGATTTGGGGAATTATTTGAGAAAGCAAAACAAAACAATAACAATAGAAAAACTTCTAATGGTGAT
GACAGCCTCTTCTTCAGTAATTTCTCACTTCTTGGTACTCCTGTCCTGAAAGATATTAATTTCAAGATAGAAAGA
GGACAGTTGTTGGCGGTTGCTGGATCCACTGGAGCAGGCAAGACTTCACTTCTAATGATGATTATGGGAGAACTG
GAGCCTTCAGAGGGTAAAATTAAGCACAGTGGAAGAATTTCATTCTGTTCTCAGTTTTCCTGGATTATGCCTGGC
ACCATTAAAGAAAATATCATCTTTGGTGTTTCCTATGATGAATATAGATACAGAAGCGTCATCAAAGCATGCCAA
CTAGAAGAGGACATCTCCAAGTTTGCAGAGAAAGACAATATAGTTCTTGGAGAAGGTGGAATCACACTGAGTGGA
GGTCAACGAGCAAGAATTTCTTTAGCAAGAGCAGTATACAAAGATGCTGATTTGTATTTATTAGACTCTCCTTTT
GGATACCTAGATGTTTTAACAGAAAAAGAAATATTTGAAAGCTGTGTCTGTAAACTGATGGCTAACAAAACTAGG
ATTTTGGTCACTTCTAAAATGGAACATTTAAAGAAAGCTGACAAAATATTAATTTTGCATGAAGGTAGCAGCTAT
TTTTATGGGACATTTTCAGAACTCCAAAATCTACAGCCAGACTTTAGCTCAAAACTCATGGGATGTGATTCTTTC
GACCAATTTAGTGCAGAAAGAAGAAATTCAATCCTAACTGAGACCTTACACCGTTTCTCATTAGAAGGAGATGCT
CCTGTCTCCTGGACAGAAACAAAAAAACAATCTTTTAAACAGACTGGAGAGTTTGGGGAAAAAAGGAAGAATTCT
ATTCTCAATCCAATCAACTCTACGCTTCAGGCACGAAGGAGGCAGTCTGTCCTGAACCTGATGACACACTCAGTT
AACCAAGGTCAGAACATTCACCGAAAGACAACAGCATCCACACGAAAAGTGTCACTGGCCCCTCAGGCAAACTTG
ACTGAACTGGATATATATTCAAGAAGGTTATCTCAAGAAACTGGCTTGGAAATAAGTGAAGAAATTAACGAAGAA
GACTTAAAGGAGTGCCTTTTTGATGATATGGAGAGCATACCAGCAGTGACTACATGGAACACATACCTTCGATAT
ATTACTGTCCACAAGAGCTTAATTTTTGTGCTAATTTGGTGCTTAGTAATTTTTCTGGCAGAGGTGGCTGCTTCT
TTGGTTGTGCTGTGGCTCCTTGGAAACACTCCTCTTCAAGACAAAGGGAATAGTACTCATAGTAGAAATAACAGC
TATGCAGTGATTATCACCAGCACCAGTTCGTATTATGTGTTTTACATTTACGTGGGAGTAGCCGACACTTTGCTT
GCTATGGGATTCTTCAGAGGTCTACCACTGGTGCATACTCTAATCACAGTGTCGAAAATTTTACACCACAAAATG
TTACATTCTGTTCTTCAAGCACCTATGTCAACCCTCAACACGTTGAAAGCAGGTGGGATTCTTAATAGATTCTCC
AAAGATATAGCAATTTTGGATGACCTTCTGCCTCTTACCATATTTGACTTCATCCAGTTGTTATTAATTGTGATT
GGAGCTATAGCAGTTGTCGCAGTTTTACAACCCTACATCTTTGTTGCAACAGTGCCAGTGATAGTGGCTTTTATT
ATGTTGAGAGCATATTTCCTCCAAACCTCACAGCAACTCAAACAACTGGAATCTGAAGGCAGGAGTCCAATTTTC
ACTCATCTTGTTACAAGCTTAAAAGGACTATGGACACTTCGTGCCTTCGGACGGCAGCCTTACTTTGAAACTCTG
TTCCACAAAGCTCTGAATTTACATACTGCCAACTGGTTCTTGTACCTGTCAACACTGCGCTGGTTCCAAATGAGA
ATAGAAATGATTTTTGTCATCTTCTTCATTGCTGTTACCTTCATTTCCATTTTAACAACAGGAGAAGGAGAAGGA
AGAGTTGGTATTATCCTGACTTTAGCCATGAATATCATGAGTACATTGCAGTGGGCTGTAAACTCCAGCATAGAT
GTGGATAGCTTGATGCGATCTGTGAGCCGAGTCTTTAAGTTCATTGACATGCCAACAGAAGGTAAACCTACCAAG
TCAACCAAACCATACAAGAATGGCCAACTCTCGAAAGTTATGATTATTGAGAATTCACACGTGAAGAAAGATGAC
ATCTGGCCCTCAGGGGGCCAAATGACTGTCAAAGATCTCACAGCAAAATACACAGAAGGTGGAAATGCCATATTA
GAGAACATTTCCTTCTCAATAAGTCCTGGCCAGAGGGTGGGCCTCTTGGGAAGAACTGGATCAGGGAAGAGTACT
TTGTTATCAGCTTTTTTGAGACTACTGAACACTGAAGGAGAAATCCAGATCGATGGTGTGTCTTGGGATTCAATA
ACTTTGCAACAGTGGAGGAAAGCCTTTGGAGTGATACCACAGAAAGTATTTATTTTTTCTGGAACATTTAGAAAA
AACTTGGATCCCTATGAACAGTGGAGTGATCAAGAAATATGGAAAGTTGCAGATGAGGTTGGGCTCAGATCTGTG
ATAGAACAGTTTCCTGGGAAGCTTGACTTTGTCCTTGTGGATGGGGGCTGTGTCCTAAGCCATGGCCACAAGCAG
TTGATGTGCTTGGCTAGATCTGTTCTCAGTAAGGCGAAGATCTTGCTGCTTGATGAACCCAGTGCTCATTTGGAT
CCAGTAACATACCAAATAATTAGAAGAACTCTAAAACAAGCATTTGCTGATTGCACAGTAATTCTCTGTGAACAC
AGGATAGAAGCAATGCTGGAATGCCAACAATTTTTGGTCATAGAAGAGAACAAAGTGCGGCAGTACGATTCCATC
CAGAAACTGCTGAACGAGAGGAGCCTCTTCCGGCAAGCCATCAGCCCCTCCGACAGGGTGAAGCTCTTTCCCCAC
CGGAACTCAAGCAAGTGCAAGTCTAAGCCCCAGATTGCTGCTCTGAAAGAGGAGACAGAAGAAGAGGTGCAAGAT
ACAAGGCTTTAG
>CFTR_recode-1 (SEQ ID NO: 3)
ATGCAGCGGTCACCCCTTGAGAAGGCATCGGTCGTGTCCAAGCTGTTCTTCAGCTGGACACGACCGATCCTTCGC
AAGGGGTACCGCCAGCGCTTGGAGCTGTCTGATATCTATCAGATTCCAAGCGTGGACAGCGCTGATAACCTCTCC
GAGAAGTTAGAGAGAGAGTGGGACCGTGAACTCGCCAGCAAGAAGAACCCAAAGCTGATCAATGCTTTGCGGCGC
TGCTTCTTCTGGCGGTTCATGTTCTACGGCATCTTTCTCTATCTCGGAGAGGTTACCAAGGCTGTCCAGCCGCTC
CTGCTGGGGCGGATAATTGCGAGCTACGATCCTGATGCGAAGGAGGAGCGCTCGATCGCCATTTATCTGGGCATC
GGGCTCTGCCTATTATTCATCGTGAGGACGTTGCTCCTGCACCCGGCGATCTTCGGTCTGCACCACATCGGGATG
CAGATGAGGATCGCCATGTTTTCTTTGATCTATAAGAAGACATTGAAGTTGTCGAGCCGGGTCCTCGACAAAATT
AGCATAGGGCAGCTGGTCAGTCTTCTGTCAGCTGCCCTAGCTAAGTTTGACGAGGGCCTGGCTCTGGCACACTTC
GTGTGGATCGCGCCGCTGCAAGTGGCGCTGCTGATGGGCCTGATATGGGAGCTCTTGCAGGCGAGCGCGTTCTGT
GGCCTGGGGTTTCTCATCGTCCTGGCCTTGTTCCAGGCAGGCCTTGGACGGATGATGATGAAGTATCGCGATCAG
CGCGCTGGTAAGATCAGCGAGCGGCTGGTCATTACCAGCGAGATGATCGAGAACATTCAGTCCGTCAAGGCCTAC
TGCTGGGAGGAGGCCATGGAGAAGATGATAGAAGCCCTCAGGCAGACAGAGCTGAAGCTCACCCGCAAGGCTGCC
TATGTCAGGTACTTCAACAGCAGCGCCTTCTTTTTCAGCGGCTTCTTTGTGGTCTTCTTGTCAGTGCTACCGTAC
GCGTTGATAAAGGGGATCATCTTGAGGAAGATCTTCACGACGATCTCCTTTTGCATCGTGTTGCGGATGGCAGTG
ACAAGACAGTTTCCATGGGCCGTCCAGACTTGGTACGACAGTCTGGGCGCCATTGCGAAAATTCAGGATTTCCTG
CAGAAGCAGGAATACAAGACCCTCGAATACGCCCTCACGACCACGGAGGTGGTGATGGAGAACGTCACCGCCTTC
TGGGAGGAGGGCTTCGGGGAGCTGTTCGAGAAGGCCAAGCAGGCCAACGCGAACAGGAAAACGTCGAACGGGGAT
GATTCCCTGTTCTTCAGCAACTTCAGCTTGCTGGGCACGCCGGTCTTGAAGGACATCAACTTCAAGATCGAGCGT
GGCCAGCTGCTGGCAGTTGCTGGAAGCACGGGTGCAGGAAAGACGTCCTTACTGATGGTTATAATGGGCGAGCTC
GAGCCCAGTGAAGGCAAGATCAAGCACTCCGGTCGCATCAGTTTCTGCTCGCAATTTTCATGGATCATGCCAGGT
ACCATCAAGGAGAACATCATCTTTGGTGTCTCCTATGATGAGTACCGCTATCGCAGCGTCATCAAGGCTTGCCAG
CTGGAGGAGGACATCAGCAAGTTCGCGGAGAAGGATAACATCGTCCTGGGGGAAGGGGGAATTACCCTCAGTGGA
GGACAGAGGGCTCGTATCAGCCTTGCTCGGGCGGTCTATAAGGACGCTGACCTGTATCTGCTGGATTCGCCGTTC
GGCTACTTAGACGTGCTCACGGAGAAGGAGATCTTCGAGAGCTGCGTCTGTAAGCTGATGGCGGCGAAGACGCGG
ATACTGGTCACGTCCAAGATGGAGCACCTGAAGAAGGCTGATAAGATCCTCATCCTCCACGAGGGTAGTTCCTAC
TTCTACGGGACGTTCTCCGAGCTCCAGAACTTGCAGCCTGACTTCAGCAGCAAGCTGATGGGCTGCGATAGCTTT
GATCAGTTCTCCGCTGAGCGCCGAAACTCCATTCTGACTGAGACTCTGCACCGCTTCTCTCTGGAAGGAGACGCC
CCGGTCTCCTGGACAGAGACGAAGAAGCAGAGTTTCAAGCAGACTGGAGAGTTCGGCGAGAAGCGGAAGAACTCG
ATCCTGAATCCAATCGCCTCTATCCGGAAGTTCAGCATTGTCCAGAAGACGCCGTTGCAGATGAACGGCATCGAG
GAGGACAGTGATGAACCTCTGGAGAGGCGATTGTCCCTTGTTCCGGACTCGGAACAAGGGGAGGCGATCTTGCCG
CGGATTTCGGTGATTAGCACTGGCCCTACGCTACAGGCGAGGCGTCGTCAGAGCGTGCTGGCTCTGATGACGCAC
TCGGTAGCGCAGGGCCAGGCTATTCACCGAAAGACGACGGCAAGTACGCGTAAAGTGAGCCTGGCTCCTCAGGCG
GCGCTGACTGAGTTGGACATCTACAGTCGGCGCCTGTCTCAGGAGACCGGGCTCGAGATAAGTGAGGAGATAGCA
GAGGAGGACCTCAAGGAGTGCTTCTTTGATGATATGGAGAGTATCCCCGCGGTGACCACGTGGGCGACTTACCTC
CGTTACATCACGGTGCACAAGTCCTTGATCTTTGTCCTCATCTGGTGTCTCGTCATTTTTCTCGCCGAGGTAGCC
GCGAGCCTGGTGGTTCTGTGGCTCCTCGGCGCGACCCCGCTCCAGGACAAGGGGAACAGCACCCACTCGAGAAAC
GCATCGTATGCAGTGATTATCACGTCCACCTCCTCGTATTATGTATTCTACATATACGTGGGGGTGGCGGATACA
CTGCTTGCGATGGGTTTCTTTAGGGGGCTGCCCCTTGTCCATACGCTGATTACTGTCAGCAAGATTCTGCATCAC
AAGATGCTCCACAGTGTCCTGCAGGCGCCTATGTCAACGTTGGCTACGTTGAAGGCGGGCGGGATACTGAACAGG
TTCTCAAAGGACATAGCGATCTTGGATGATCTCTTGCCTTTGACCATTTTTGACTTTATCCAGCTGCTGCTGATC
GTGATAGGGGCCATCGCGGTCGTCGCGGTGCTGCAGCCATATATCTTTGTGGCTACAGTACCCGTGATCGTGGCC
TTTATCATGCTTCGGGCTTACTTCCTTCAGACTTCCCAGCAGCTGAAGCAGCTGGAGTCTGAAGGAAGAAGCCCG
ATTTTTACGCATCTGGTAACCAGCTTGAAGGGGCTGTGGACATTGCGGGCATTCGGGCGGCAGCCGTATTTTGAG
ACCTTGTTCCACAAGGCTCTCAATTTGCACACTGCCGCCTGGTTCCTGTATTTGTCCACGCTCCGCTGGTTCCAG
ATGCGTATCGAGATGATCTTCGTGATCTTCTTCATCGCCGTCACCTTCATCAGTATTCTGACGACTGGTGAGGGC
GAGGGGAGGGTCGGGATCATCTTGACGCTCGCGATGAACATCATGAGCACGCTCCAGTGGGCTGTCGCGTCGAGC
ATCGACGTCGACAGCCTCATGCGGAGCGTGTCTCGTGTGTTCAAGTTCATCGATATGCCGACCGAGGGAAAGCCG
ACCAAGAGTACGAAGCCGTACAAGAACGGTCAGCTTTCCAAGGTCATGATTATCGAGAACTCCCACGTGAAGAAG
GACGACATCTGGCCTTCTGGGGGACAGATGACCGTGAAGGACCTTACCGCCAAGTATACTGAGGGGGGTAATGCT
ATCCTGGAGGCCATATCGTTCTCGATCTCCCCCGGTCAGCGCGTGGGGCTGCTGGGGCGGACAGGGAGTGGTAAG
TCCACTCTCCTGTCCGCCTTCCTGCGGCTCCTCGCGACTGAGGGGGAGATCCAGATCGATGGGGTCTCCTGGGAT
AGCATTACCCTCCAGCAGTGGCGGAAGGCCTTCGGGGTCATCCCCCAGAAGGTCTTCATCTTCAGTGGGACGTTT
CGTAAGGCGTTGGACCCTTACGAACAGTGGTCGGATCAAGAGATATGGAAGGTCGCCGACGAGGTGGGTCTTCGC
TCCGTTATTGAGCAGTTTCCGGGCAAGCTAGACTTCGTCTTAGTTGACGGTGGCTGTGTGTTGTCACACGGCCAC
AAGCAGCTGATGTGTCTAGCTCGCTCGGTGCTCAGTAAAGCGAAGATCCTCTTGTTGGACGAGCCTTCCGCCCAT
CTTGATCCGGTCACTTATCAGATCATCAGGCGGACACTCAAGCAGGCCTTTGCGGATTGCACAGTGATTCTGTGC
GAGCACCGCATAGAGGCCATGCTTGAGTGTCAGCAGTTTCTGGTGATCGAGGAGGCTAAGGTCCGCCAGTATGAT
TCGATCCAGAAGTTACTGGCGGAGCGTAGCCTCTTCCGACAGGCGATCTCGCCGTCGGATAGAGTCAAGCTGTTT
CCTCACCGGGCCTCCTCGAAGTGTAAGTCAAAGCCGCAGATTGCGGCTTTGAAGGAGGAGACTGAGGAGGAGGTC
CAGGACACGCGGCTCTAA
>CFTR_recode-2 (SEQ ID NO: 4)
ATGCAGCGGTCACCCCTTGAGAAGGCATCGGTCGTGTCCAAGCTGTTCTTCAGCTGGACACGACCGATCCTTCGC
AAGGGGTACCGCCAGCGCTTGGAGCTGTCTGATATCTATCAGATTCCAAGCGTGGACAGCGCTGATAACCTCTCC
GAGAAGTTAGAGAGAGAGTGGGACCGTGAACTCGCCAGCAAGAAGAACCCAAAGCTGATCAATGCTTTGCGGCGC
TGCTTCTTCTGGCGGTTCATGTTCTACGGCATCTTTCTCTATCTCGGAGAGGTTACCAAGGCTGTCCAGCCGCTC
CTGCTGGGGCGGATAATTGCGAGCTACGATCCTGATGCGAAGGAGGAGCGCTCGATCGCCATTTATCTGGGCATC
GGGCTCTGCCTATTATTCATCGTGAGGACGTTGCTCCTGCACCCGGCGATCTTCGGTCTGCACCACATCGGGATG
CAGATGAGGATCGCCATGTTTTCTTTGATCTATAAGAAGACATTGAAGTTGTCGAGCCGGGTCCTCGACAAAATT
AGCATAGGGCAGCTGGTCAGTCTTCTGTCAGCTGCCCTAGCTAAGTTTGACGAGGGCCTGGCTCTGGCACACTTC
GTGTGGATCGCGCCGCTGCAAGTGGCGCTGCTGATGGGCCTGATATGGGAGCTCTTGCAGGCGAGCGCGTTCTGT
GGCCTGGGGTTTCTCATCGTCCTGGCCTTGTTCCAGGCAGGCCTTGGACGGATGATGATGAAGTATCGCGATCAG
CGCGCTGGTAAGATCAGCGAGCGGCTGGTCATTACCAGCGAGATGATCGAGAACATTCAGTCCGTCAAGGCCTAC
TGCTGGGAGGAGGCCATGGAGAAGATGATAGAAGCCCTCAGGCAGACAGAGCTGAAGCTCACCCGCAAGGCTGCC
TATGTCAGGTACTTCAACAGCAGCGCCTTCTTTTTCAGCGGCTTCTTTGTGGTCTTCTTGTCAGTGCTACCGTAC
GCGTTGATAAAGGGGATCATCTTGAGGAAGATCTTCACGACGATCTCCTTTTGCATCGTGTTGCGGATGGCAGTG
ACAAGACAGTTTCCATGGGCCGTCCAGACTTGGTACGACAGTCTGGGCGCCATTGCGAAAATTCAGGATTTCCTG
CAGAAGCAGGAATACAAGACCCTCGAATACGCCCTCACGACCACGGAGGTGGTGATGGAGAACGTCACCGCCTTC
TGGGAGGAGGGCTTCGGGGAGCTGTTCGAGAAGGCCAAGCAGGCCAACGCGAACAGGAAAACGTCGAACGGGGAT
GATTCCCTGTTCTTCAGCAACTTCAGCTTGCTGGGCACGCCGGTCTTGAAGGACATCAACTTCAAGATCGAGCGT
GGCCAGCTGCTGGCAGTTGCTGGAAGCACGGGTGCAGGAAAGACGTCCTTACTGATGGTTATAATGGGCGAGCTC
GAGCCCAGTGAAGGCAAGATCAAGCACTCCGGTCGCATCAGTTTCTGCTCGCAATTCTCATGGATCATGCCCGGT
ACCATCAAGGAGAACATCATCTTTGGTGTCTCCTATGATGAGTACCGGTATCGATCCGTGATTAAGGCTTGTCAG
CTGGAGGAGGATATCTCCAAGTTCGCCGAGAAGGATAACATCGTTCTCGGCGAAGGAGGTATCACCCTCTCTGGT
GGCCAGAGAGCGCGTATTTCGCTGGCCAGAGCTGTATACAAGGACGCGGATCTCTACCTTCTCGACAGCCCGTTC
GGTTATCTGGACGTGCTGACCGAGAAGGAGATATTCGAGTCCTGTGTGTGCAAGCTCATGGCCGCGAAGACGCGC
ATTCTGGTCACCAGTAAAATGGAGCATCTGAAGAAGGCCGATAAGATACTGATTCTCCACGAGGGGAGTTCGTAT
TTTTACGGCACTTTTTCAGAGCTCCAAAATCTTCAGCCCGATTTCTCCAGTAAGCTTATGGGCTGCGATTCGTTT
GATCAGTTCTCAGCTGAGCGGCGCAACTCCATTCTGACGGAGACCTTGCATAGGTTTTCGTTAGAAGGAGATGCG
CCGGTCAGCTGGACTGAGACGAAGAAGCAGTCCTTTAAGCAGACTGGAGAATTCGGGGAGAAGAGGAAAAATTCG
ATACTGAACCCCATTGCGAGCATTCGCAAGTTCAGTATCGTGCAGAAGACGCCTCTCCAGATGAACGGAATCGAG
GAGGACTCAGACGAGCCGCTGGAGCGGCGGCTCAGTCTGGTCCCCGATTCCGAGCAGGGAGAGGCGATTCTGCCA
CGCATCAGCGTGATCTCCACCGGGCCTACCCTGCAGGCCCGGCGGAGACAGAGTGTCCTAGCTCTGATGACGCAC
TCTGTGGCGCAAGGGCAGGCCATCCATCGTAAGACGACCGCGTCTACGAGGAAGGTCTCCCTTGCGCCACAGGCT
GCGTTAACAGAGCTGGACATTTATTCGAGGAGGCTCTCCCAGGAGACCGGCTTGGAGATCTCGGAGGAGATCGCC
GAGGAGGATCTCAAGGAGTGCTTCTTCGACGATATGGAGAGCATACCAGCAGTGACGACGTGGGCGACTTATTTA
CGGTATATTACCGTACATAAGTCGCTCATTTTCGTCCTGATCTGGTGTCTCGTCATATTTCTGGCGGAGGTCGCG
GCGTCGCTGGTTGTGTTGTGGCTGTTGGGTGCTACTCCCCTGCAGGACAAGGGGAATAGCACCCACAGCCGCAAC
GCCAGCTACGCCGTGATCATCACCAGCACAAGCTCTTACTATGTCTTCTACATCTATGTCGGGGTGGCGGACACG
CTGCTGGCCATGGGTTTCTTCCGTGGCCTGCCGCTTGTCCACACCCTGATAACGGTGTCGAAGATATTGCATCAC
AAGATGCTCCATTCAGTGTTGCAAGCGCCGATGTCGACGCTTGCAACACTGAAGGCGGGGGGGATCCTCAACCGG
TTTAGCAAGGACATTGCTATACTGGATGATCTCCTCCCGCTGACTATCTTTGACTTCATCCAGCTGCTGCTGATC
GTGATCGGGGCGATAGCCGTGGTCGCGGTCTTGCAGCCGTACATCTTCGTGGCCACAGTCCCTGTGATAGTGGCG
TTCATCATGCTGAGGGCGTACTTCCTTCAGACTTCCCAGCAGCTGAAGCAGCTGGAGTCTGAAGGAAGGTCGCCC
ATCTTCACGCATTTGGTGACGTCACTCAAGGGACTGTGGACCTTGAGGGCGTTCGGCAGGCAGCCGTATTTCGAG
ACCTTGTTCCACAAGGCCTTGAACCTGCATACGGCTGCCTGGTTCCTCTACCTCTCCACTCTCCGGTGGTTCCAG
ATGAGGATCGAGATGATCTTCGTGATATTCTTTATCGCGGTGACCTTCATCTCGATCCTCACCACCGGAGAGGGA
GAGGGGAGGGTCGGGATCATCCTGACCCTCGCTATGAACATCATGAGCACGCTCCAGTGGGCTGTCGCGTCGAGC
ATCGACGTCGACAGCCTCATGCGGAGCGTGTCTCGTGTGTTCAAGTTCATAGATATGCCGACGGAGGGTAAGCCC
ACTAAAAGTACGAAGCCCTACAAGAACGGCCAGCTGTCCAAGGTGATGATTATCGAGAACAGTCACGTCAAGAAG
GACGACATCTGGCCCTCGGGTGGGCAGATGACGGTGAAGGACCTCACTGCCAAGTACACCGAGGGCGGGAACGCC
ATTCTTGAGGCGATCTCGTTCTCGATATCACCTGGACAGCGGGTCGGCTTGTTGGGCCGTACTGGTAGTGGGAAG
TCGACCCTCCTGTCGGCATTTCTTCGCCTTCTGGCCACAGAAGGCGAAATCCAGATCGATGGGGTGTCCTGGGAT
TCCATAACGTTGCAGCAGTGGAGGAAGGCCTTCGGGGTGATTCCCCAGAAGGTCTTCATCTTCTCTGGGACGTTT
CGGAAGGCCCTGGACCCCTACGAGCAGTGGAGCGACCAGGAGATCTGGAAGGTCGCGGACGAGGTGGGCCTGCGG
AGCGTCATAGAGCAGTTCCCTGGAAAGCTCGACTTCGTGCTGGTAGACGGCGGTTGTGTGCTGTCCCACGGCCAC
AAGCAGCTGATGTGCCTAGCACGAAGCGTGCTTTCCAAGGCGAAGATACTGCTCTTGGACGAGCCGTCGGCCCAC
CTCGACCCCGTGACCTACCAGATCATCCGTCGCACACTCAAGCAGGCCTTTGCGGATTGCACAGTGATTCTGTGC
GAGCACCGCATAGAGGCCATGCTTGAGTGTCAGCAGTTCCTCGTGATCGAGGAAGCTAAAGTCCGCCAGTACGAC
TCGATCCAGAAGTTGCTGGCGGAGCGGTCCCTCTTTCGGCAGGCGATCTCGCCTTCGGACCGCGTTAAGCTGTTC
CCCCACCGGGCGAGCAGCAAATGCAAGTCCAAGCCGCAGATCGCCGCGCTGAAAGAGGAGACCGAGGAGGAAGTC
CAAGATACTCGGCTCTAA
>CFTR_recode-3 (SEQ ID NO: 5)
ATGCAGAGGTCGCCCCTTGAGAAGGCATCGGTCGTGTCCAAGCTGTTCTTCAGCTGGACACGACCGATCCTTCGC
AAGGGGTACCGCCAGCGACTGGAGTTGTCTGATATCTATCAGATACCTTCAGTCGACTCGGCGGATAACCTCTCC
GAGAAGTTAGAGAGAGAGTGGGACCGTGAACTCGCCAGCAAGAAGAACCCAAAGCTGATCAATGCTTTGCGGCGC
TGCTTCTTCTGGCGGTTCATGTTCTACGGCATCTTTCTCTATCTCGGAGAGGTTACGAAGGCGGTGCAGCCGCTC
CTGCTGGGGCGGATCATCGCCTCGTATGACCCAGACGCGAAGGAGGAGCGCTCCATCGCGATCTATCTGGGCATA
GGCCTCTGCCTCCTCTTTATTGTTCGTACCTTGCTTCTGCACCCCGCGATCTTCGGTCTGCACCACATCGGGATG
CAGATGAGGATCGCCATGTTTTCTTTGATCTATAAGAAGACATTGAAGTTGTCGAGCCGGGTCCTCGACAAAATT
AGCATAGGGCAGCTGGTCAGTCTTCTGTCAGCTGCCCTAGCTAAGTTTGACGAGGGCCTGGCTCTGGCACACTTC
GTGTGGATCGCTCCACTCCAGGTGGCGCTGTTGATGGGCCTGATATGGGAGCTCTTGCAGGCGAGCGCGTTCTGT
GGCCTGGGGTTTCTCATCGTCCTGGCCTTGTTCCAGGCAGGCCTTGGACGGATGATGATGAAGTATCGCGATCAG
CGCGCTGGTAAGATCAGCGAGCGGCTGGTCATTACCAGCGAGATGATCGAGAACATTCAGTCCGTCAAGGCCTAC
TGCTGGGAGGAGGCCATGGAGAAGATGATAGAAGCCCTCAGGCAGACAGAGCTGAAGCTCACCCGCAAGGCTGCC
TATGTCAGGTACTTCAACAGCTCCGCCTTCTTCTTCTCAGGGTTCTTTGTCGTGTTTCTGTCCGTCCTCCCCTAC
GCGTTGATAAAGGGGATCATCTTGAGGAAGATCTTCACGACGATCTCCTTTTGCATCGTGTTGAGGATGGCAGTG
ACACGACAATTCCCCTGGGCCGTGCAGACATGGTACGACAGTTTAGGGGCTATTGCGAAGATCCAGGATTTTCTG
CAGAAGCAAGAGTACAAGACGCTGGAATACGCCCTCACGACCACGGAGGTGGTCATGGAGAACGTGACCGCCTTC
TGGGAGGAGGGCTTTGGTGAGCTCTTCGAGAAGGCCAAGCAGGCCAACGCCAATCGGAAGACTAGTAACGGCGAC
GACTCCCTGTTCTTCAGCAACTTCAGCTTGCTGGGCACGCCGGTCTTGAAGGACATCAACTTCAAGATCGAGCGT
GGCCAGCTGCTGGCAGTTGCTGGGAGCACGGGAGCGGGCAAGACTAGTCTTCTGATGGTGATCATGGGCGAGCTT
GAGCCTTCCGAAGGGAAGATCAAACATTCAGGCCGGATCAGCTTCTGTAGCCAGTTCTCGTGGATCATGCCGGGG
ACGATAAAGGAGAATATCATCTTCGGCGTGAGCTACGACGAATACCGCTACAGAAGCGTGATCAAGGCCTGCCAG
CTCGAGGAGGATATCTCCAAGTTCGCCGAGAAGGATAACATCGTTCTCGGCGAAGGAGGTATCACCTTGAGCGGC
GGTCAGCGCGCCCGGATAAGCCTGGCACGGGCTGTCTATAAAGATGCAGACTTGTATCTTTTAGACAGCCCGTTC
GGGTATCTGGACGTGCTGACCGAAAAGGAGATCTTCGAGTCGTGCGTTTGTAAGCTGATGGCGGCCAAGACGAGG
ATTCTTGTCACCTCTAAGATGGAGCATCTTAAGAAGGCTGACAAGATCCTCATTCTGCACGAGGGGAGCTCCTAC
TTCTATGGGACGTTCAGCGAGTTGCAGAATCTTCAGCCCGATTTCTCCAGTAAGCTTATGGGCTGTGACTCCTTC
GATCAGTTCTCAGCTGAGCGGCGCAACTCCATTCTGACGGAGACCTTGCATAGGTTTTCGTTAGAAGGAGATGCG
CCGGTCAGCTGGACTGAGACGAAGAAGCAGAGCTTTAAGCAGACTGGAGAATTCGGGGAGAAGAGAAAGAACTCG
ATCCTGAACCCCATAGCAAGTATCAGGAAGTTCTCCATCGTGCAGAAAACGCCCCTGCAGATGAACGGGATCGAG
GAGGACAGTGATGAGCCGCTAGAACGGAGGCTGTCGCTGGTGCCTGACTCAGAGCAGGGCGAGGCGATATTACCG
AGAATCTCGGTGATATCGACTGGCCCTACTCTGCAGGCCCGGCGACGGCAGTCCGTTCTAGCGCTCATGACCCAC
TCGGTCGCGCAGGGGCAGGCCATCCATCGGAAGACAACCGCATCGACTCGAAAGGTCTCCTTAGCGCCGCAGGCG
GCGCTAACGGAGCTCGACATATATTCGAGGAGGCTCTCCCAGGAGACCGGCTTGGAGATCTCGGAGGAGATCGCC
GAGGAGGATCTCAAGGAGTGCTTCTTCGATGATATGGAGAGCATTCCAGCGGTGACGACTTGGGCTACTTACCTG
CGCTACATCACGGTGCACAAGTCGCTGATCTTCGTGCTGATCTGGTGCTTGGTAATTTTCCTTGCCGAAGTGGCG
GCGTCCCTAGTAGTCTTGTGGCTACTAGGGGCGACGCCACTTCAGGACAAGGGAAATTCCACGCACTCACGTAAT
GCGAGCTATGCGGTGATCATCACCAGCACTAGCTCGTATTACGTGTTCTACATCTATGTCGGGGTGGCGGACACG
CTGCTGGCCATGGGATTCTTCCGTGGCCTGCCGCTTGTCCACACCCTGATAACGGTGTCGAAGATACTGCATCAC
AAGATGCTCCACAGCGTGCTCCAAGCACCGATGAGCACGCTGGCGACGTTGAAGGCGGGGGGGATCCTCAACAGG
TTTTCCAAGGATATCGCTATCCTGGATGACCTGTTGCCCCTCACGATCTTCGACTTCATCCAGCTGTTGCTCATC
GTGATTGGAGCAATCGCTGTGGTAGCAGTGTTGCAGCCCTATATCTTCGTGGCGACTGTGCCCGTGATAGTAGCG
TTTATCATGCTGCGGGCCTACTTCTTGCAGACTTCACAGCAGTTGAAGCAGCTGGAGTCGGAGGGGCGGTCGCCC
ATATTCACGCACCTGGTCACGAGCCTGAAGGGGCTCTGGACCTTGCGTGCGTTTGGGCGACAGCCCTACTTCGAG
ACCCTGTTTCATAAGGCTTTGAATCTGCATACCGCAGCATGGTTCCTGTACCTCTCCACTCTCCGGTGGTTTCAG
ATGCGGATTGAGATGATCTTCGTGATTTTCTTTATCGCGGTGACATTCATTTCGATTCTGACCACCGGAGAGGGA
GAGGGCAGGGTGGGCATAATCCTCACTCTGGCTATGAACATCATGTCGACGCTACAGTGGGCTGTAGCGTCGAGC
ATAGATGTTGATAGCCTGATGAGGAGTGTGTCCAGGGTATTCAAGTTCATTGACATGCCCACGGAGGGTAAGCCT
ACGAAGAGCACCAAGCCGTACAAGAACGGCCAGCTCTCGAAGGTAATGATCATCGAGAACAGCCATGTGAAGAAG
GACGACATATGGCCCTCAGGAGGGCAGATGACAGTGAAGGACCTCACTGCCAAGTACACCGAGGGGGGCAACGCG
ATCCTCGAGGCGATATCGTTCTCGATATCGCCCGGGCAGCGCGTTGGCCTCCTCGGTCGTACTGGCAGTGGGAAG
TCCACACTGTTATCTGCCTTCCTGAGGCTTCTCGCCACTGAGGGAGAGATCCAGATTGATGGAGTCTCCTGGGAC
TCCATCACTCTCCAGCAGTGGCGGAAGGCCTTCGGGGTGATTCCCCAGAAGGTGTTCATATTTTCAGGGACCTTT
CGTAAGGCCCTGGACCCGTATGAGCAGTGGTCGGATCAGGAGATCTGGAAGGTAGCAGACGAGGTCGGCCTTCGG
AGCGTGATCGAGCAGTTCCCAGGTAAGCTGGACTTTGTGCTCGTGGATGGGGGCTGCGTCCTCAGCCACGGGCAC
AAACAGCTTATGTGTCTTGCTCGATCAGTGCTCTCGAAGGCCAAGATCTTGCTGCTAGACGAGCCTTCCGCGCAT
CTCGATCCGGTCACTTACCAAATCATTCGGCGAACGCTGAAGCAAGCGTTCGCCGATTGCACCGTGATCCTGTGT
GAGCACAGGATCGAGGCGATGCTGGAGTGCCAGCAGTTCTTGGTGATCGAGGAGGCCAAGGTGCGGCAGTACGAC
TCGATCCAGAAGCTTCTGGCGGAGAGAAGCCTGTTCCGTCAGGCTATCTCTCCGTCAGATCGGGTCAAGTTGTTT
CCGCACCGGGCCTCCTCGAAATGCAAGTCAAAGCCGCAGATAGCGGCTTTGAAAGAAGAAACAGAGGAGGAGGTC
CAGGACACCCGCCTCTGA
>CFTR_recode-4 (SEQ ID NO: 6)
ATGCAGAGGTCGCCCCTTGAGAAGGCATCGGTCGTGTCCAAGCTGTTCTTCAGCTGGACACGACCGATCCTTCGC
AAGGGGTACCGCCAGCGACTGGAGCTATCTGATATCTATCAGATACCTTCAGTCGACTCGGCGGATAATCTGTCC
GAGAAGCTAGAGCGTGAATGGGATCGTGAGCTCGCCAGCAAGAAGAACCCGAAGCTCATAAACGCGCTCAGAAGA
TGCTTCTTCTGGCGCTTTATGTTCTACGGGATCTTCTTGTACCTTGGCGAGGTCACGAAGGCCGTTCAGCCTCTG
CTTCTCGGACGGATTATCGCTAGTTATGACCCCGATGCTAAGGAGGAGCGGTCCATCGCGATATACTTAGGCATA
GGCTTATGCCTATTGTTTATCGTGAGGACCCTCCTCCTGCATCCGGCGATCTTCGGTCTGCACCACATCGGGATG
CAGATGAGGATCGCCATGTTTTCTTTGATCTATAAGAAGACATTGAAGTTGTCGAGCCGGGTCCTCGACAAAATT
AGCATAGGGCAGCTGGTGAGCTTATTATCAGCTGCCCTAGCTAAGTTTGACGAGGGCCTGGCTCTGGCACACTTC
GTCTGGATCGCCCCATTGCAGGTGGCACTGCTAATGGGGCTGATCTGGGAGCTGCTCCAGGCTTCCGCGTTCTGT
GGTCTCGGATTTCTCATCGTTCTGGCCCTGTTCCAGGCGGGACTGGGCCGGATGATGATGAAGTACCGAGACCAG
AGAGCGGGGAAGATCTCGGAGCGGCTGGTCATAACTAGCGAGATGATCGAGAACATTCAGAGCGTGAAGGCGTAC
TGCTGGGAGGAGGCCATGGAGAAGATGATTGAAGCATTAAGGCAGACGGAGTTGAAGCTGACACGTAAGGCCGCT
TACGTGCGGTACTTCAACTCCTCTGCCTTTTTCTTCAGTGGCTTCTTCGTGGTCTTCCTCAGCGTACTGCCTTAC
GCTCTGATCAAGGGGATCATCCTTCGCAAGATCTTCACGACTATCAGCTTCTGCATCGTCCTACGGATGGCGGTG
ACCCGCCAGTTTCCGTGGGCGGTGCAGACCTGGTATGATAGTCTTGGAGCCATTGCGAAGATTCAGGATTTCCTG
CAGAAGCAGGAATACAAGACCCTCGAATACGCCCTCACGACCACGGAGGTGGTGATGGAGAACGTCACCGCCTTC
TGGGAGGAGGGCTTCGGGGAGCTGTTCGAGAAGGCCAAGCAGGCCAACGCGAACCGCAAGACCTCGAACGGGGAT
GATTCCCTGTTCTTCAGCAACTTCAGCCTGCTGGGCACGCCGGTCTTGAAGGACATCAACTTCAAGATCGAGCGT
GGCCAGCTGCTGGCAGTTGCTGGAAGTACGGGCGCTGGCAAGACTTCCCTTCTGATGGTGATAATGGGCGAATTA
GAGCCATCAGAAGGGAAGATCAAGCACAGCGGCCGTATTAGCTTCTGCAGCCAGTTCAGCTGGATTATGCCAGGC
ACCATCAAGGAGAATATCATATTCGGTGTATCGTACGACGAGTATCGGTATCGGTCGGTCATCAAGGCATGCCAG
CTCGAGGAGGATATCTCCAAGTTCGCCGAGAAGGACAACATCGTGTTAGGCGAAGGGGGAATCACGCTAAGTGGA
GGTCAGCGTGCTCGTATATCGCTCGCCAGAGCGGTATACAAGGACGCTGACCTCTACTTGCTTGATTCCCCCTTC
GGCTATCTCGATGTCCTTACGGAGAAGGAGATATTCGAGAGCTGTGTATGCAAGTTGATGGCCGCCAAGACGCGG
ATACTCGTCACGAGTAAGATGGAGCACCTCAAGAAGGCAGATAAGATTCTGATCCTTCATGAGGGCTCCTCTTAC
TTCTATGGGACGTTCAGTGAGCTGCAGAATCTTCAGCCCGATTTCTCCAGTAAGCTTATGGGCTGTGACTCCTTC
GATCAGTTCTCAGCTGAGCGGCGCAACTCCATTCTGACGGAGACCTTGCATAGGTTTTCGTTAGAAGGAGATGCG
CCGGTCAGCTGGACTGAGACGAAGAAGCAGAGCTTTAAGCAGACTGGAGAATTCGGGGAGAAGAGAAAGAACAGC
ATACTGAACCCCATAGCTTCCATCCGGAAGTTCAGCATCGTCCAGAAGACTCCTCTCCAGATGAATGGAATCGAG
GAGGATTCGGACGAGCCCCTGGAGCGTCGGCTCAGTCTGGTCCCGGATTCCGAGCAGGGGGAGGCCATCCTCCCT
CGGATTTCGGTGATCAGCACTGGGCCGACGCTCCAGGCCCGGCGCCGTCAGAGCGTCCTGGCGCTGATGACACAC
AGCGTGGCGCAGGGTCAGGCGATCCATCGCAAGACCACTGCGTCCACGCGGAAGGTGTCATTAGCGCCACAGGCC
GCTCTGACGGAGCTGGATATCTACAGCCGCCGTCTCTCCCAGGAGACGGGGCTGGAGATATCGGAGGAGATCGCC
GAGGAGGACCTCAAGGAGTGCTTCTTCGACGACATGGAGAGCATTCCTGCGGTCACTACCTGGGCGACCTACCTC
CGATACATCACGGTACACAAGAGTTTGATATTCGTCTTGATATGGTGCCTGGTCATATTCCTAGCTGAAGTGGCT
GCATCGCTCGTGGTGTTGTGGCTGTTGGGTGCTACTCCCCTGCAGGACAAGGGGAATAGCACCCACAGCCGCAAC
GCCTCGTACGCGGTGATCATCACCAGTACGAGCTCCTACTATGTGTTCTACATATATGTAGGAGTTGCTGACACG
TTGTTAGCGATGGGCTTCTTCAGGGGGTTACCCCTGGTCCATACGCTGATAACGGTCAGCAAGATCCTGCACCAC
AAGATGCTCCATTCAGTGTTGCAAGCGCCGATGTCGACGCTTGCAACACTGAAGGCTGGAGGCATCTTGAACAGG
TTCTCGAAGGACATTGCAATACTGGACGACCTATTGCCCCTGACGATCTTCGACTTCATCCAGTTGTTGTTGATC
GTCATAGGGGCAATAGCGGTCGTCGCAGTATTGCAGCCGTACATCTTTGTCGCCACTGTGCCAGTTATCGTCGCC
TTCATAATGTTGAGAGCCTACTTCCTTCAGACTAGTCAGCAGCTGAAGCAGTTGGAGAGCGAGGGTCGCTCTCCA
ATCTTCACGCACTTGGTGACTAGTCTGAAGGGGCTCTGGACATTGCGGGCATTCGGGCGGCAGCCGTATTTTGAG
ACCTTGTTCCACAAGGCTCTCAATTTACACACTGCCGCCTGGTTCCTGTACCTCTCCACTCTCCGGTGGTTCCAG
ATGAGGATCGAGATGATCTTCGTGATATTCTTTATCGCGGTGACCTTCATCTCGATCCTCACCACCGGAGAGGGA
GAGGGGCGAGTGGGGATCATTCTCACACTCGCCATGAACATCATGAGCACGCTCCAGTGGGCTGTCGCGTCGAGC
ATCGACGTCGACAGCCTCATGCGGAGCGTGTCTCGTGTGTTCAAGTTCATCGATATGCCTACGGAGGGCAAGCCC
ACCAAGAGTACGAAGCCGTACAAGAATGGGCAGCTCTCCAAGGTAATGATTATCGAGAACTCCCATGTGAAGAAG
GACGATATCTGGCCCAGTGGCGGCCAGATGACGGTTAAAGACCTTACTGCGAAGTACACCGAAGGCGGCAACGCC
ATTCTGGAGGCGATATCGTTTTCCATCTCACCCGGTCAGCGGGTCGGCCTCCTCGGTCGCACGGGGTCGGGGAAG
AGCACTCTGCTGAGTGCTTTTCTCCGACTCCTTGCGACCGAGGGGGAGATCCAGATTGACGGGGTGAGTTGGGAT
TCGATAACCCTCCAGCAGTGGCGTAAGGCCTTCGGTGTAATTCCGCAGAAGGTCTTTATCTTCTCGGGGACCTTC
CGGAAGGCTCTTGATCCGTACGAGCAATGGTCGGATCAAGAGATCTGGAAGGTCGCCGACGAAGTCGGGCTTCGC
TCGGTGATCGAGCAGTTCCCGGGCAAGCTCGACTTCGTCTTGGTCGATGGAGGGTGCGTTCTGAGCCACGGCCAT
AAGCAGCTTATGTGCCTGGCTCGGAGCGTACTCTCCAAGGCCAAGATTCTGCTCTTGGATGAGCCGAGTGCTCAC
CTGGATCCGGTGACCTACCAGATCATTCGGCGAACGCTGAAGCAAGCGTTCGCCGATTGCACCGTGATCCTGTGT
GAGCACAGGATCGAGGCCATGCTGGAGTGCCAGCAGTTCCTCGTGATCGAGGAAGCGAAGGTACGCCAGTATGAC
TCGATCCAGAAGCTGCTGGCGGAGAGATCCCTGTTCCGTCAGGCGATCTCTCCGTCAGACCGGGTGAAGCTATTT
CCTCATCGGGCCTCCTCGAAGTGCAAGTCAAAGCCGCAGATTGCGGCTTTGAAGGAGGAGACCGAGGAGGAAGTG
CAGGACACCCGGTTATAA
>CFTR_recode-5 (SEQ ID NO: 7)
ATGCAGAGGTCGCCCCTTGAGAAGGCATCGGTCGTGTCCAAGCTGTTCTTCAGCTGGACACGACCGATCCTTCGC
AAGGGGTACCGCCAGCGACTGGAGCTATCTGATATCTATCAGATACCTTCAGTCGACTCGGCGGATAATCTGTCC
GAGAAGCTAGAGCGTGAATGGGATCGTGAGCTCGCCAGCAAGAAGAACCCGAAGCTCATAAACGCGCTCAGAAGA
TGCTTCTTCTGGCGCTTTATGTTCTACGGGATCTTCTTGTACCTTGGCGAGGTCACGAAGGCCGTTCAGCCTCTG
CTTCTCGGACGGATTATCGCTAGTTATGACCCCGATGCTAAGGAGGAGCGGTCCATCGCGATATACTTAGGCATA
GGCTTATGCCTATTGTTTATCGTGAGGACCCTCCTCCTGCATCCGGCGATCTTCGGTCTGCACCACATCGGGATG
CAGATGAGGATCGCCATGTTTTCTTTGATCTATAAGAAGACATTGAAGTTGTCGAGCCGGGTCCTCGACAAAATT
AGCATAGGGCAGCTGGTGAGCTTATTATCAGCTGCCCTAGCTAAGTTTGACGAGGGCCTGGCTCTGGCACACTTC
GTCTGGATCGCCCCATTGCAGGTGGCACTGCTAATGGGGCTGATCTGGGAGCTGCTCCAGGCTTCCGCGTTCTGT
GGTCTCGGATTTCTCATCGTTCTGGCCCTGTTCCAGGCGGGACTGGGCCGGATGATGATGAAGTACCGAGACCAG
AGAGCGGGGAAGATCTCGGAGCGGCTGGTCATAACTAGCGAGATGATCGAGAACATTCAGAGCGTGAAGGCGTAC
TGCTGGGAGGAGGCCATGGAGAAGATGATTGAAGCATTAAGGCAGACGGAGTTGAAGCTGACACGTAAGGCCGCT
TACGTGCGGTACTTCAACTCCTCTGCCTTTTTCTTCAGTGGCTTCTTCGTGGTCTTCCTCAGCGTACTGCCTTAC
GCTCTGATCAAGGGGATCATCCTTCGCAAGATCTTCACGACTATCAGCTTCTGCATCGTCCTACGGATGGCGGTG
ACCCGCCAGTTTCCGTGGGCGGTGCAGACCTGGTATGATAGTCTTGGAGCCATTGCGAAGATTCAGGATTTCCTG
CAGAAGCAGGAATACAAGACCCTCGAATACGCCCTCACGACCACGGAGGTGGTGATGGAGAACGTCACCGCCTTC
TGGGAGGAGGGCTTCGGGGAGCTGTTCGAGAAGGCCAAGCAGGCCAACGCGAACCGCAAGACCTCGAACGGGGAT
GATTCCCTGTTCTTCAGCAACTTCAGCCTGCTGGGCACGCCGGTCTTGAAGGACATCAACTTCAAGATCGAGCGT
GGCCAGCTGCTGGCAGTTGCTGGAAGTACGGGCGCTGGCAAGACTTCCCTTCTGATGGTGATAATGGGCGAATTA
GAGCCATCAGAAGGGAAGATCAAGCACAGCGGCCGTATTAGCTTCTGCAGCCAGTTCAGCTGGATTATGCCAGGC
ACCATCAAGGAGAATATCATATTCGGTGTATCGTACGACGAGTATCGGTATCGGTCGGTCATCAAGGCATGCCAG
CTCGAGGAGGATATCTCCAAGTTCGCCGAGAAGGACAACATCGTGTTAGGCGAAGGGGGAATCACGCTAAGTGGA
GGTCAGCGTGCTCGTATATCGCTCGCCAGAGCGGTATACAAGGACGCTGACCTCTACTTGCTTGATTCCCCCTTC
GGCTATCTCGATGTCCTTACGGAGAAGGAGATATTCGAGAGCTGTGTATGCAAGTTGATGGCCGCCAAGACGCGG
ATACTCGTCACGAGTAAGATGGAGCACCTCAAGAAGGCAGATAAGATTCTGATCCTTCATGAGGGCTCCTCTTAC
TTCTATGGGACGTTCAGTGAGCTGCAGAATCTTCAGCCCGATTTCTCCAGTAAGCTTATGGGCTGTGACTCCTTC
GATCAGTTCTCAGCTGAGCGGCGCAACTCCATTCTGACGGAGACCTTGCATAGGTTTTCGTTAGAAGGAGATGCG
CCGGTCAGCTGGACTGAGACGAAGAAGCAGAGCTTTAAGCAGACTGGAGAATTCGGGGAGAAGAGAAAGAACAGC
ATACTGAACCCCATAGCTTCCATCCGGAAGTTCAGCATCGTCCAGAAGACTCCTCTCCAGATGAATGGAATCGAG
GAGGATTCGGACGAGCCCCTGGAGCGTCGGCTCAGTCTGGTCCCGGATTCCGAGCAGGGGGAGGCCATCCTCCCT
CGGATTTCGGTGATCAGCACTGGGCCGACGCTCCAGGCCCGGCGCCGTCAGAGCGTCCTGGCGCTGATGACACAC
AGCGTGGCGCAGGGTCAGGCGATCCATCGCAAGACCACTGCGTCCACGCGGAAGGTGTCATTAGCGCCACAGGCC
GCTCTGACGGAGCTGGATATCTACAGCCGCCGTCTCTCCCAGGAGACGGGGCTGGAGATATCGGAGGAGATCGCC
GAGGAGGACCTCAAGGAGTGCTTCTTCGACGACATGGAGAGCATTCCTGCGGTCACTACCTGGGCGACCTACCTC
CGATACATCACGGTACACAAGAGTTTGATATTCGTCTTGATATGGTGCCTGGTCATATTCCTAGCTGAAGTGGCT
GCATCGCTCGTGGTGTTGTGGCTGTTGGGTGCTACTCCCCTGCAGGACAAGGGGAATAGCACCCACAGCCGCAAC
GCCTCGTACGCGGTGATCATCACCAGTACGAGCTCCTACTATGTGTTCTACATATATGTAGGAGTTGCTGACACG
TTGTTAGCGATGGGCTTCTTCAGGGGGTTACCCCTGGTCCATACGCTGATAACGGTCAGCAAGATCCTGCACCAC
AAGATGCTCCATTCAGTGTTGCAAGCGCCGATGTCGACGCTTGCAACACTGAAGGCTGGAGGCATCTTGAACAGG
TTCTCGAAGGACATTGCAATACTGGACGACCTATTGCCCCTGACGATCTTCGACTTCATCCAGTTGTTGTTGATC
GTCATAGGGGCAATAGCGGTCGTCGCAGTATTGCAGCCGTACATCTTTGTCGCCACTGTGCCAGTTATCGTCGCC
TTCATAATGTTGAGAGCCTACTTCCTTCAGACTAGTCAGCAGCTGAAGCAGTTGGAGAGCGAGGGTCGCTCTCCA
ATCTTCACGCACTTGGTGACTAGTCTGAAGGGGCTCTGGACATTGCGGGCATTCGGGCGGCAGCCGTATTTTGAG
ACCTTGTTCCACAAGGCTCTCAATTTACACACTGCCGCCTGGTTCCTGTACCTCTCCACTCTCCGGTGGTTCCAG
ATGAGGATCGAGATGATCTTCGTGATATTCTTTATCGCGGTGACCTTCATCTCGATCCTCACCACCGGAGAGGGA
GAGGGGCGAGTGGGGATCATTCTCACACTCGCCATGAACATCATGAGCACGCTCCAGTGGGCTGTCGCGTCGAGC
ATCGACGTCGACAGCCTCATGCGGAGCGTGTCTCGTGTGTTCAAGTTCATCGATATGCCTACGGAGGGCAAGCCC
ACCAAGAGTACGAAGCCGTACAAGAATGGGCAGCTCTCCAAGGTAATGATTATCGAGAACTCCCATGTGAAGAAG
GACGATATCTGGCCCAGTGGCGGCCAGATGACGGTTAAAGACCTTACTGCGAAGTACACCGAAGGCGGCAACGCC
ATTCTGGAGGCGATATCGTTTTCCATCTCACCCGGTCAGCGGGTCGGCCTCCTCGGTCGCACGGGGTCGGGGAAG
AGCACTCTGCTGAGTGCTTTTCTCCGACTCCTTGCGACCGAGGGGGAGATCCAGATTGACGGGGTGAGTTGGGAT
TCGATAACCCTCCAGCAGTGGCGTAAGGCCTTCGGTGTAATTCCGCAGAAGGTCTTTATCTTTTCCGGGACCTTC
CGGAAGGCTCTTGATCCGTACGAGCAATGGTCGGATCAAGAGATCTGGAAGGTCGCGGACGAAGTCGGGCTTCGC
TCGGTGATCGAGCAGTTCCCGGGCAAGCTCGACTTCGTCTTGGTCGATGGAGGGTGCGTTCTCTCGCACGGGCAC
AAGCAGCTGATGTGCCTGGCGAGGAGCGTACTCTCCAAGGCCAAGATCCTCCTCCTCGATGAGCCGTCGGCGCAT
CTGGACCCGGTGACTTACCAGATTATTCGCCGGACGCTGAAACAAGCTTTCGCGGACTGTACGGTGATATTGTGT
GAGCACCGGATAGAGGCTATGCTCGAGTGCCAGCAGTTTCTGGTTATCGAAGAGGCGAAGGTTCGCCAGTACGAT
AGCATCCAGAAGCTGCTGGCCGAGCGTAGCCTCTTCCGGCAGGCAATATCACCGTCAGACCGCGTAAAGCTGTTT
CCGCATCGGGCGAGTAGTAAGTGTAAGTCAAAGCCGCAGATCGCCGCGCTCAAGGAGGAGACGGAGGAGGAGGTG
CAGGACACGCGCCTCTAA
>CFTR_recode-6 (SEQ ID NO: 8)
ATGCAGAGGTCCCCCCTTGAGAAGGCATCGGTCGTGTCCAAGCTGTTCTTCAGCTGGACACGACCGATCCTTCGC
AAGGGGTACCGCCAGCGACTGGAGCTATCTGATATCTATCAGATACCTTCAGTCGACTCGGCGGATAATCTGTCC
GAGAAGCTAGAGCGTGAATGGGATCGTGAGCTCGCCAGCAAGAAGAACCCGAAGCTCATAAACGCGCTCAGAAGA
TGCTTCTTCTGGCGCTTTATGTTCTACGGGATCTTCTTGTACCTTGGCGAGGTCACGAAGGCCGTTCAGCCTCTG
CTTCTCGGACGGATTATCGCTAGTTATGACCCCGATGCTAAGGAGGAGCGGTCCATCGCGATATACTTAGGCATA
GGCTTATGCCTATTGTTTATCGTGAGGACCCTCCTCCTGCATCCGGCGATCTTCGGTCTGCACCACATCGGGATG
CAGATGAGGATCGCCATGTTTTCTTTGATCTATAAGAAGACATTGAAGTTGTCGAGCCGGGTCCTCGACAAAATT
AGCATAGGGCAGCTGGTGAGCTTATTATCAGCTGCCCTAGCTAAGTTTGACGAGGGCCTGGCTCTGGCACACTTC
GTCTGGATCGCCCCATTGCAGGTGGCACTGCTAATGGGGCTGATCTGGGAGCTGCTCCAGGCTTCCGCGTTCTGT
GGTCTCGGATTTCTCATCGTTCTGGCCCTGTTCCAGGCGGGACTGGGCCGGATGATGATGAAGTACCGAGACCAG
AGAGCGGGGAAGATCTCGGAGCGGCTGGTCATAACTAGCGAGATGATCGAGAACATTCAGAGCGTGAAGGCGTAC
TGCTGGGAGGAGGCCATGGAGAAGATGATTGAAGCATTAAGGCAGACGGAGTTGAAGCTGACACGTAAGGCCGCT
TACGTGCGGTACTTCAACTCCTCTGCCTTTTTCTTCAGTGGCTTCTTCGTGGTCTTCCTCAGCGTACTGCCTTAC
GCTCTGATCAAGGGGATCATCCTTCGCAAGATCTTCACGACTATCAGCTTCTGCATCGTCCTACGGATGGCGGTG
ACCCGCCAGTTTCCGTGGGCGGTGCAGACCTGGTATGATAGTCTTGGAGCCATTGCGAAGATCCAGGACTTCTTG
CAGAAGCAGGAGTATAAGACTCTGGAGTACGCCCTCACGACCACGGAGGTGGTGATGGAGAACGTCACCGCCTTC
TGGGAGGAGGGCTTCGGGGAGTTGTTCGAGAAGGCCAAGCAGGCCAACGCCAATCGAAAGACTTCGAATGGCGAT
GACAGCTTGTTCTTCTCGAACTTCTCCCTGCTGGGCACGCCGGTCTTGAAGGACATCAACTTCAAGATCGAGCGT
GGCCAGCTCCTGGCGGTGGCCGGGAGCACGGGGGCTGGGAAGACCAGCCTCCTCATGGTGATCATGGGGGAGCTC
GAGCCAAGTGAAGGGAAGATCAAACACTCGGGCCGGATTAGTTTTTGCTCGCAGTTTTCATGGATCATGCCCGGT
ACCATCAAGGAGAACATCATCTTTGGTGTCTCCTATGATGAGTACCGGTATCGATCCGTGATAAAGGCCTGCCAG
CTCGAGGAGGATATCTCCAAGTTCGCCGAGAAGGATAACATCGTTCTCGGCGAAGGAGGTATCACCTTGAGCGGC
GGGCAGCGAGCAAGAATTAGTCTGGCCCGAGCTGTTTACAAGGATGCTGACCTTTACTTGCTCGACTCCCCCTTT
GGTTACCTTGACGTACTCACAGAGAAGGAGATCTTTGAGTCCTGCGTCTGCAAGTTGATGGCGGCGAAGACCAGG
ATCTTGGTCACCTCTAAGATGGAGCATCTTAAGAAGGCGGACAAGATCCTCATTCTGCACGAGGGGAGCTCCTAC
TTCTATGGGACGTTCAGCGAGTTGCAGAATCTTCAGCCCGATTTCTCCAGTAAGCTTATGGGCTGCGATTCGTTT
GATCAGTTCTCAGCTGAGCGGCGCAACTCCATTCTGACGGAGACCTTGCATAGGTTTTCGTTAGAAGGAGATGCG
CCGGTCAGCTGGACTGAGACGAAGAAGCAGTCCTTTAAGCAGACTGGAGAATTCGGGGAGAAGAGAAAGAACTCG
ATCCTGAACCCCATAGCAAGTATCAGGAAGTTCTCCATCGTGCAGAAGACGCCGCTCCAGATGAACGGAATCGAG
GAGGATTCCGACGAGCCTCTGGAGCGGCGTCTTTCCCTTGTTCCGGACTCGGAACAAGGGGAGGCCATACTGCCG
CGCATCAGCGTTATCAGCACGGGGCCGACGCTGCAGGCGCGGCGTCGGCAGTCCGTGCTGGCGCTGATGACGCAC
AGTGTGGCCCAGGGCCAGGCTATCCACCGCAAGACGACCGCGTCTACGCGGAAGGTTAGCCTGGCCCCCCAGGCG
GCACTGACGGAGCTCGACATATATTCGAGGAGGCTCTCCCAGGAGACCGGCTTGGAGATCTCGGAGGAGATCGCC
GAGGAGGATCTCAAGGAGTGCTTCTTCGATGATATGGAGAGCATTCCGGCAGTGACCACCTGGGCCACTTACCTT
CGCTACATCACCGTGCATAAGAGCTTGATATTCGTGCTGATCTGGTGTCTGGTTATCTTTCTCGCTGAAGTGGCG
GCGTCCCTAGTAGTCTTGTGGCTGCTAGGGGCGACGCCACTTCAGGACAAAGGTAACTCGACCCACAGCAGGAAT
GCAAGCTATGCGGTGATCATTACGAGCACCAGCTCGTACTACGTGTTCTACATCTACGTCGGGGTGGCGGACACG
CTGCTGGCCATGGGATTCTTCCGTGGCCTGCCGCTTGTCCACACCCTGATAACTGTTAGCAAGATCTTGCACCAC
AAGATGTTGCACAGTGTCCTTCAAGCGCCGATGAGTACTCTCGCCACGCTTAAAGCGGGCGGGATACTCAATCGG
TTCTCGAAGGACATCGCCATCCTAGACGATCTGCTGCCGCTGACGATATTCGACTTTATCCAGCTGCTGCTGATC
GTCATAGGGGCGATTGCGGTTGTAGCTGTGCTACAGCCGTATATATTCGTGGCCACGGTCCCAGTGATAGTGGCG
TTCATTATGTTGAGGGCGTACTTCCTTCAGACTTCCCAGCAGCTGAAGCAGCTGGAGTCTGAAGGAAGGTCGCCC
ATTTTCACCCACCTGGTGACAAGTCTCAAGGGCCTGTGGACGTTGAGGGCCTTTGGGAGGCAGCCGTACTTCGAG
ACGCTGTTCCATAAGGCCCTCAACCTCCACACGGCCGCTTGGTTCTTGTATCTCTCCACTCTCCGGTGGTTCCAG
ATGAGGATCGAGATGATCTTCGTGATATTCTTTATCGCGGTGACCTTCATCTCGATCCTCACCACCGGAGAGGGA
GAGGGCCGGGTCGGGATCATCCTGACCCTGGCCATGAACATAATGAGCACCCTGCAGTGGGCCGTGGCCTCGAGT
ATAGATGTAGACTCACTGATGAGGAGCGTGTCGCGAGTTTTCAAGTTTATCGACATGCCTACGGAGGGCAAGCCC
ACCAAGAGTACGAAGCCGTACAAGAATGGGCAGCTCTCCAAGGTAATGATAATTGAGAACTCGCACGTCAAGAAA
GACGATATCTGGCCCTCCGGTGGGCAGATGACGGTCAAGGACCTCACTGCCAAGTACACGGAGGGCGGGAACGCC
ATTCTGGAAGCGATATCGTTTTCCATCTCACCCGGTCAGAGGGTCGGCCTCCTCGGTCGCACGGGGTCGGGGAAG
AGCACTCTGCTGAGTGCTTTTCTCCGACTCCTTGCGACCGAGGGGGAGATCCAGATCGACGGGGTGAGTTGGGAT
TCGATAACGCTCCAGCAGTGGCGTAAGGCCTTCGGGGTTATACCCCAGAAGGTCTTCATCTTTTCCGGGACCTTC
CGGAAGGCTCTTGATCCCTACGAGCAGTGGAGCGATCAAGAGATCTGGAAGGTCGCGGATGAGGTGGGGTTGAGG
AGCGTGATCGAGCAGTTTCCAGGAAAGCTGGACTTCGTCCTTGTTGACGGAGGCTGCGTGCTGAGCCATGGGCAC
AAGCAGCTCATGTGCTTAGCACGCAGCGTCCTCAGCAAGGCGAAGATCCTGCTCCTGGATGAGCCGAGCGCGCAC
CTCGACCCGGTGACGTACCAGATCATCCGGCGGACGTTGAAACAGGCCTTTGCGGACTGTACAGTGATCCTCTGC
GAGCATCGGATCGAGGCCATGCTGGAGTGCCAGCAGTTCCTCGTGATAGAGGAAGCGAAGGTACGCCAGTATGAC
TCGATCCAGAAGTTGCTCGCAGAGCGATCACTGTTCCGCCAGGCCATTTCACCGTCCGACCGGGTGAAGCTGTTC
CCGCACCGCGCCTCCTCCAAGTGTAAGTCAAAGCCGCAGATTGCGGCTTTGAAGGAGGAGACTGAGGAGGAGGTG
CAGGACACGCGCCTCTAA
>CFTR_recode-7 (SEQ ID NO: 9)
ATGCAGAGGTCCCCCCTTGAGAAGGCATCGGTCGTGTCCAAGCTGTTCTTCAGCTGGACACGACCCATCCTCCGG
AAGGGTTATCGGCAGCGACTGGAGCTATCTGATATCTATCAGATACCTTCAGTCGACTCTGCCGATAACCTCAGC
GAGAAGCTGGAGCGAGAATGGGATCGTGAGCTGGCGAGTAAGAAGGCCCCGAAGCTAATAGCTGCACTGCGTCGT
TGCTTCTTCTGGAGGTTTATGTTTTATGGCATATTCCTCTACTTAGGAGAAGTAACGAAGGCAGTGCAGCCGTTG
CTTCTGGGCCGGATTATCGCCAGCTACGATCCCGATGCGAAGGAGGAGAGGTCGATCGCCATCTACTTGGGGATC
GGCCTCTGCCTCCTTTTCATCGTGCGGACATTGTTGCTGCACCCGGCGATCTTCGGTCTGCACCACATCGGGATG
CAGATGAGGATCGCCATGTTCTCGCTGATCTACAAGAAGACGCTGAAGCTGAGCTCTCGCGTCTTGGACAAGATC
AGCATTGGGCAGCTGGTAAGCTTGCTCAGTGCTGCTCTTGCCAAGTTCGACGAGGGCTTAGCTTTAGCGCACTTC
GTGTGGATCGCCCCGCTGCAGGTGGCGCTCCTGATGGGGCTCATCTGGGAGCTCCTTCAGGCTAGCGCCTTCTGC
GGCTTGGGGTTCTTGATCGTCCTCGCATTATTTCAGGCGGGTCTCGGCCGCATGATGATGAAGTACCGGGACCAG
CGTGCCGGTAAGATCAGCGAGCGGCTGGTGATCACGTCTGAGATGATCGAGGCGATCCAGAGCGTTAAGGCGTAC
TGCTGGGAAGAAGCCATGGAGAAGATGATCGAGGCGCTGCGGCAAACCGAACTTAAGCTGACCAGAAAGGCAGCT
TATGTTCGGTACTTTGCCAGCAGCGCCTTCTTCTTCTCCGGCTTCTTCGTAGTATTCCTTAGCGTTCTGCCGTAC
GCGCTGATAAAGGGAATCATCCTCAGGAAGATCTTCACGACTATCAGCTTCTGCATCGTCTTACGAATGGCCGTC
ACGCGCCAGTTCCCATGGGCGGTGCAGACCTGGTATGACAGCCTCGGGGCGATAGCGAAGATCCAGGACTTCCTG
CAGAAGCAGGAGTACAAGACCCTGGAGTACGCGCTAACGACCACCGAGGTTGTCATGGAGGCTGTAACGGCCTTT
TGGGAAGAGGGGTTTGGCGAGCTATTCGAGAAGGCGAAGCAGGCAGCTGCTAATCGGAAGACTTCCAATGGGGAT
GATTCCCTTTTCTTCAGCGCGTTCAGTCTCTTGGGGACGCCGGTCCTCAAGGACATCGCGTTCAAGATTGAGCGC
GGCCAGCTTCTCGCTGTTGCCGGCTCCACCGGAGCCGGCAAAACCAGCTTGCTCATGGTGATAATGGGCGAGCTG
GAACCGTCCGAGGGCAAGATCAAGCACAGCGGGCGGATCAGCTTCTGCTCGCAGTTCAGCTGGATCATGCCCGGG
ACGATCAAGGAGGCAATAATCTTCGGGGTTAGCTACGACGAGTATAGATATCGCTCCGTCATCAAGGCCTGCCAG
CTCGAGGAGGATATCTCCAAGTTCGCCGAGAAGGATGCCATCGTTCTCGGCGAAGGAGGTATCACCTTGAGCGGT
GGCCAGAGAGCGCGTATTTCGCTGGCCAGAGCTGTATACAAGGACGCGGATCTCTACCTTCTCGACAGCCCGTTC
GGTTATCTGGACGTGCTGACCGAGAAGGAGATATTCGAGTCCTGTGTGTGCAAGCTCATGGCCGCGAAGACGCGC
ATTCTGGTCACCAGCAAGATGGAGCATCTGAAGAAGGCCGATAAGATACTGATTCTCCACGAGGGGAGTTCGTAT
TTTTACGGCACTTTTTCAGAGCTCCAGAACTTGCAGCCGGACTTCTCCAGTAAGCTTATGGGCTGCGATTCGTTT
GATCAGTTCTCCGCGGAGCGGCGGGCGTCCATCCTGACTGAGACGTTGCATCGTTTCAGTCTGGAGGGGGACGCC
CCCGTTTCGTGGACTGAGACGAAGAAGCAGTCCTTTAAGCAGACTGGAGAGTTCGGCGAGAAGCGAAAGGCGTCA
ATCTTGGCGCCTATCGCTTCTATTCGGAAGTTCAGCATCGTGCAGAAGACGCCGCTCCAGATGGCTGGTATCGAG
GAGGACTCGGACGAGCCTCTGGAGCGGCGTCTTTCGCTGGTGCCGGACTCCGAACAGGGCGAGGCTATCCTTCCG
CGCATCAGCGTTATCAGCACGGGGCCGACGCTGCAGGCGCGGCGTCGGCAGTCCGTGCTGGCGCTGATGACGCAT
AGCGTGGCGCAGGGTCAGGCGATCCATCGCAAGACCACTGCGTCCACGCGGAAGGTTAGCCTCGCCCCCCAGGCC
GCCTTGACGGAGCTTGATATCTATAGTCGTCGTTTGTCCCAGGAGACCGGTTTAGAGATCTCGGAGGAGATCGCG
GAGGAGGACTTGAAGGAGTGCTTCTTCGACGATATGGAGAGCATACCAGCAGTGACGACGTGGGCGACTTATCTA
CGGTACATAACCGTACATAAGTCGCTCATTTTCGTCCTGATCTGGTGTCTCGTCATATTTCTGGCGGAGGTGGCG
GCATCGCTAGTGGTGTTGTGGCTGCTGGGTGCTACCCCCTTGCAGGACAAGGGGGCTAGCACCCACAGCCGCAAC
GCCAGCTATGCGGTGATCATCACCTCCACCAGCTCCTACTATGTGTTCTACATATATGTAGGAGTTGCTGACACG
TTATTAGCGATGGGCTTCTTCAGGGGGTTACCCCTGGTCCATACGCTGATAACGGTCAGCAAAATCCTCCACCAT
AAGATGTTGCACAGCGTGCTCCAGGCCCCCATGAGCACGCTGGCAACTCTTAAGGCTGGAGGAATTCTGAACCGG
TTCTCCAAGGACATCGCTATCCTCGATGATTTATTGCCACTCACAATATTCGACTTCATCCAGTTGTTGTTGATC
GTCATAGGGGCGATTGCGGTTGTAGCTGTGCTACAGCCGTATATATTCGTGGCCACGGTCCCAGTGATAGTGGCG
TTCATTATGTTGAGGGCGTACTTCCTTCAGACTTCCCAGCAGCTGAAGCAGCTGGAGTCTGAAGGAAGGTCGCCC
ATTTTCACCCACCTGGTGACAAGTCTCAAGGGCCTGTGGACGTTGAGGGCCTTTGGGAGGCAGCCGTACTTCGAG
ACGCTGTTCCATAAGGCCCTCAACCTCCACACGGCCGCTTGGTTCTTGTATCTCTCCACTCTCCGGTGGTTCCAG
ATGAGGATCGAGATGATCTTCGTGATATTCTTTATCGCGGTGACCTTCATCTCGATCCTCACCACCGGAGAGGGA
GAGGGCCGGGTCGGGATCATCCTGACCCTGGCCATGAACATAATGAGCACCCTGCAGTGGGCCGTGGCCTCGAGT
ATAGATGTAGACTCACTGATGAGGAGCGTGTCGCGAGTTTTCAAGTTTATCGACATGCCTACGGAGGGCAAGCCC
ACCAAGAGTACGAAGCCGTACAAGAATGGGCAGCTCTCCAAGGTAATGATAATTGAGAACTCGCACGTCAAGAAA
GACGATATCTGGCCCTCCGGTGGGCAGATGACGGTCAAGGACCTCACTGCCAAGTACACGGAGGGCGGGAACGCC
ATTCTGGAAGCGATATCGTTTTCCATCTCACCCGGTCAGAGGGTCGGCCTCCTCGGTCGCACGGGGTCGGGGAAG
AGCACTCTGCTGAGTGCTTTTCTCCGACTCCTTGCGACCGAGGGGGAGATCCAGATCGACGGGGTGAGTTGGGAT
TCGATAACGCTCCAGCAGTGGCGTAAGGCCTTCGGGGTTATACCCCAGAAGGTCTTCATCTTTTCCGGGACCTTC
CGGAAGGCTCTTGATCCCTACGAGCAGTGGAGCGATCAAGAGATCTGGAAGGTCGCGGATGAGGTGGGGTTGAGG
AGCGTGATCGAGCAGTTTCCAGGAAAGCTGGACTTCGTCCTTGTTGACGGAGGCTGCGTGCTGAGCCATGGGCAC
AAGCAGCTCATGTGCTTAGCACGCAGCGTCCTCAGCAAGGCGAAGATCCTGCTCCTGGATGAGCCGAGCGCGCAC
CTCGACCCGGTGACGTACCAGATCATCCGGCGGACGTTGAAACAGGCCTTTGCGGACTGTACAGTGATCCTCTGC
GAGCATCGGATCGAGGCCATGCTGGAGTGCCAGCAGTTCCTCGTGATAGAGGAAGCGAAGGTACGCCAGTATGAC
TCGATCCAGAAGTTGCTCGCAGAGCGATCACTGTTCCGCCAGGCCATTTCACCGTCCGACCGGGTGAAGCTGTTC
CCGCACCGCGCCTCCTCCAAGTGTAAGTCAAAGCCGCAGATTGCGGCTTTGAAGGAGGAGACTGAGGAGGAGGTG
CAGGACACGCGCCTCTAA
>CFTR_recode-8 (SEQ ID NO: 10)
ATGCAGAGGTCCCCCCTTGAGAAGGCATCGGTCGTGTCCAAGCTGTTCTTCAGCTGGACACGCCCGATACTCCGC
AAGGGCTACCGCCAGCGGCTGGAGCTCTCGGACATTTACCAGATCCCCTCCGTCGATTCCGCTGACGCTCTCAGC
GAGAAGCTGGAGCGTGAGTGGGATCGAGAGCTGGCGAGCAAGAAAGCGCCAAAATTAATAGCGGCGCTGCGCCGC
TGTTTTTTTTGGCGCTTTATGTTCTACGGCATCTTCCTGTATCTTGGCGAGGTAACGAAGGCGGTGCAGCCGCTC
CTCCTTGGCCGGATCATAGCCTCATATGATCCGGACGCCAAGGAGGAGCGGAGCATCGCCATCTACCTCGGCATC
GGTCTGTGTCTGCTGTTTATAGTGCGGACCTTATTGCTGCACCCAGCAATATTCGGTCTGCACCATATAGGCATG
CAGATGCGGATCGCGATGTTCTCGCTGATCTACAAGAAGACGCTGAAGCTGAGCTCTCGCGTCTTGGACAAGATC
AGCATTGGGCAGCTGGTAAGCTTGCTCAGTGCTGCTCTTGCCAAGTTCGACGAGGGCTTAGCTTTAGCGCACTTC
GTGTGGATCGCGCCGCTCCAGGTGGCCCTGTTAATGGGACTGATCTGGGAGCTGCTCCAGGCTTCCGCGTTCTGT
GGTCTCGGCTTCCTCATCGTCCTAGCCCTGTTTCAAGCAGGGCTAGGACGAATGATGATGAAGTATCGAGACCAG
AGAGCGGGGAAGATCTCTGAGCGGCTCGTGATCACGTCCGAGATGATAGAGGCCATCCAGAGCGTGAAAGCCTAC
TGTTGGGAGGAGGCTATGGAGAAGATGATCGAGGCGTTGCGGCAGACCGAGTTAAAGTTGACTCGGAAGGCCGCA
TACGTCCGATACTTCGCCTCCAGTGCCTTCTTCTTCAGTGGGTTTTTTGTCGTGTTTCTGTCTGTGCTGCCCTAT
GCATTGATAAAGGGGATCATCCTGAGGAAGATCTTCACGACGATCTCCTTTTGCATAGTGCTGCGCATGGCAGTG
ACACGACAGTTCCCCTGGGCTGTCCAGACATGGTACGACAGCCTAGGGGCAATCGCCAAGATACAGGACTTCCTG
CAGAAGCAGGAATACAAGACGCTGGAGTACGCCTTGACGACCACGGAGGTGGTCATGGAGGCGGTCACAGCGTTT
TGGGAGGAGGGATTTGGTGAATTGTTCGAGAAGGCCAAGCAGGCTGCAGCGAACCGGAAGACGAGCAACGGGGAC
GACTCGTTGTTCTTTTCCGCGTTCAGCCTGCTTGGCACGCCGGTCTTGAAGGACATCGCCTTCAAGATCGAGCGT
GGCCAGCTGCTGGCGGTAGCCGGGAGTACGGGCGCAGGGAAGACCAGCTTGCTCATGGTGATCATGGGCGAGCTG
GAGCCTTCCGAGGGCAAGATCAAGCACAGCGGGCGGATCAGCTTCTGCTCGCAGTTCAGCTGGATCATGCCCGGT
ACCATCAAGGAGGCTATCATCTTTGGTGTCTCCTATGATGAGTACCGATATCGGAGCGTGATCAAGGCCTGCCAG
CTCGAGGAGGATATCTCCAAGTTCGCCGAGAAGGACGCCATAGTCCTCGGCGAAGGAGGTATCACCTTGAGCGGC
GGGCAGCGCGCTCGGATATCGCTGGCCAGAGCTGTATACAAGGACGCGGATCTCTACCTTCTCGACAGCCCGTTC
GGTTATCTGGACGTGCTGACCGAGAAGGAGATATTCGAGTCCTGTGTATGCAAGCTCATGGCCGCGAAGACGCGG
ATATTGGTGACCAGTAAGATGGAGCACCTCAAGAAGGCGGACAAGATCCTTATCCTGCACGAGGGGTCGTCCTAC
TTCTACGGGACCTTCAGCGAGTTGCAGGCACTTCAGCCAGACTTTTCGTCCAAGCTGATGGGGTGCGACTCCTTC
GACCAGTTCTCGGCGGAGCGTCGTGCGTCAATCTTGACGGAGACGCTCCACCGGTTCTCGTTGGAGGGGGACGCA
CCCGTCAGCTGGACGGAGACGAAAAAACAGTCTTTTAAGCAGACTGGAGAATTTGGGGAGAAGCGAAAGGCGTCA
ATCTTGGCGCCTATCGCTTCTATCCGCAAATTCTCCATTGTGCAGAAGACGCCGCTCCAGATGGCTGGTATCGAG
GAGGACTCGGACGAGCCTCTGGAGCGGCGGCTTTCCCTTGTTCCGGACTCGGAGCAAGGGGAAGCCATCTTGCCG
CGGATTTCGGTGATATCGACCGGGCCCACGCTGCAAGCGAGGCGTCGTCAGAGCGTGCTGGCTCTGATGACGCAC
TCGGTTGCGCAGGGCCAGGCGATACACCGAAAGACGACGGCAAGTACCCGTAAGGTCAGCCTGGCCCCCCAGGCT
GCCCTTACGGAACTAGACATCTACTCAAGACGACTGAGTCAGGAGACTGGACTGGAGATATCGGAGGAGATCGCC
GAGGAGGACCTGAAGGAATGCTTCTTCGACGACATGGAGAGCATTCCTGCAGTGACCACCTGGGCGACCTACCTC
CGATATATCACAGTCCACAAGTCCCTGATTTTCGTCTTGATCTGGTGTCTAGTTATCTTCCTGGCTGAAGTGGCT
GCCTCGCTGGTGGTCCTGTGGTTGTTAGGGGCGACCCCTCTGCAGGATAAGGGTGCGTCCACCCACTCGAGGGCT
GCATCTTACGCGGTCATCATCACGTCCACGTCTTCGTATTATGTGTTCTACATATATGTCGGGGTGGCGGACACG
CTGCTGGCCATGGGATTCTTCCGTGGCCTGCCGCTTGTCCACACCCTGATAACCGTGTCCAAGATCCTGCACCAC
AAGATGTTGCACAGCGTGCTCCAGGCCCCCATGAGCACGCTGGCAACATTGAAGGCGGGCGGGATCTTGGCACGG
TTCAGCAAGGACATCGCGATCCTAGACGATCTGCTGCCGCTGACGATATTCGACTTTATCCAGCTGCTGCTGATC
GTCATAGGAGCCATCGCGGTCGTTGCTGTGCTGCAGCCATATATCTTTGTGGCTACAGTGCCGGTGATAGTCGCA
TTCATCATGCTGCGAGCATATTTCCTCCAGACTTCCCAGCAACTGAAGCAGTTAGAGAGCGAAGGCCGATCTCCC
ATCTTCACTCACCTGGTCACGTCGCTCAAAGGCCTGTGGACCCTACGGGCCTTTGGGCGACAGCCTTATTTCGAG
ACCCTCTTCCATAAGGCGCTGGCCCTTCATACGGCTGCGTGGTTTTTGTACCTCTCCACTCTCCGGTGGTTCCAG
ATGAGGATCGAGATGATCTTCGTGATATTCTTTATCGCGGTGACCTTCATCTCGATCCTCACCACCGGAGAGGGA
GAGGGGCGAGTCGGCATCATATTGACGCTGGCCATGGCCATTATGAGTACTCTCCAATGGGCCGTGGCCAGCTCA
ATAGATGTCGACTCGCTCATGCGTTCCGTCAGTCGCGTGTTTAAGTTCATAGACATGCCGACTGAGGGAAAGCCC
ACAAAATCCACGAAGCCGTATAAGAACGGCCAGCTGTCCAAGGTGATGATTATTGAAGCTAGTCACGTCAAGAAG
GACGACATCTGGCCCTCCGGTGGGCAGATGACGGTGAAGGACCTCACTGCCAAGTACACGGAGGGCGGGGCCGCC
ATTCTTGAGGCGATTAGCTTCAGTATATCACCTGGACAGAGGGTGGGCTTGCTGGGCCGGACCGGGTCCGGCAAG
TCCACCCTCCTCTCCGCCTTCCTTCGCTTGCTTGCGACGGAAGGGGAGATCCAGATCGATGGGGTGTCCTGGGAT
TCCATAACGTTGCAGCAGTGGAGGAAGGCCTTCGGGGTTATACCCCAGAAGGTCTTCATCTTCTCTGGGACGTTT
CGGAAGGCCCTGGACCCCTACGAGCAGTGGAGTGACCAGGAGATCTGGAAGGTGGCCGACGAGGTCGGCCTTCGC
TCTGTGATTGAGCAGTTTCCTGGGAAGCTGGATTTTGTGCTCGTAGATGGTGGATGCGTACTATCACACGGCCAC
AAGCAGTTGATGTGCCTCGCTCGCTCCGTCTTGTCCAAGGCCAAGATCCTGCTGCTGGACGAGCCCAGCGCTCAC
CTCGATCCGGTGACGTACCAGATCATCCGGCGAACGCTGAAGCAAGCGTTCGCCGACTGCACGGTGATCTTGTGC
GAGCACCGGATCGAGGCGATGCTGGAGTGCCAGCAGTTCTTGGTCATCGAGGAGGCCAAGGTGCGGCAGTACGAC
TCGATCCAGAAGCTTCTGGCGGAGAGAAGCCTGTTCCGGCAGGCTATCTCTCCGTCAGATCGGGTCAAGTTGTTT
CCGCACCGGGCCTCCTCGAAATGCAAGTCAAAGCCGCAGATTGCGGCTTTGAAGGAGGAGACGGAGGAGGAGGTA
CAGGATACTCGCTTGTGA
>CFTR_recode-9 (SEQ ID NO: 11)
ATGCAGAGGTCCCCCCTTGAGAAGGCATCGGTCGTGTCCAAGCTGTTCTTCAGCTGGACACGCCCAATTCTTCGG
AAAGGTTATCGGCAGCGACTGGAGTTATCTGATATCTATCAGATACCTTCAGTCGACTCTGCCGATAACCTTTCC
GAAAAGTTGGAGCGCGAATGGGACCGCGAGCTCGCGTCCAAGAAGAACCCGAAGCTCATAAACGCGCTCAGAAGA
TGCTTCTTCTGGCGCTTTATGTTCTACGGGATCTTCCTGTATCTTGGCGAGGTCACCAAGGCTGTCCAGCCGCTC
CTCCTTGGCCGGATCATAGCCTCATATGATCCGGACGCCAAGGAGGAGCGGAGCATTGCTATATACCTGGGCATA
GGCCTGTGCCTCCTCTTCATAGTTCGGACTCTGCTGCTGCACCCGGCCATCTTCGGCCTCCACCACATCGGTATG
CAGATGCGGATTGCGATGTTCTCTCTGATTTATAAGAAGACGCTCAAGCTCAGCTCGCGGGTCCTGGACAAGATC
TCAATCGGCCAACTGGTCAGCCTGTTGAGCGCAGCACTAGCCAAGTTCGACGAAGGGCTGGCGCTTGCGCATTTC
GTATGGATAGCCCCATTGCAGGTGGCACTGCTAATGGGGCTAATATGGGAATTGCTGCAAGCGTCAGCCTTTTGC
GGACTTGGCTTCCTGATAGTGCTGGCGCTCTTCCAGGCTGGCCTTGGCCGAATGATGATGAAGTACCGGGACCAG
CGAGCTGGGAAGATCTCGGAGCGTCTTGTTATAACATCAGAGATGATCGAGAACATCCAATCCGTAAAGGCATAC
TGTTGGGAGGAGGCCATGGAGAAGATGATCGAGGCGCTGCGGCAGACCGAACTAAAGTTGACGAGGAAGGCAGCC
TATGTCCGGTATTTCAATAGCAGTGCTTTCTTCTTCTCGGGGTTCTTTGTGGTGTTCTTGTCAGTGCTGCCCTAT
GCACTGATCAAGGGCATCATACTCCGGAAGATTTTTACCACGATCAGCTTCTGCATCGTCCTACGGATGGCGGTG
ACCCGCCAGTTTCCGTGGGCGGTGCAGACGTGGTACGACAGCCTTGGTGCCATCGCCAAGATACAGGACTTCCTG
CAGAAGCAGGAATACAAGACGCTGGAGTACGCCTTGACGACCACGGAGGTGGTCATGGAGGCGGTCACAGCGTTT
TGGGAGGAGGGATTTGGTGAATTGTTCGAGAAGGCCAAGCAGGCTGCAGCGAACCGGAAGACGAGCAACGGGGAC
GACTCGTTGTTCTTTTCCGCGTTCAGCCTGCTTGGCACGCCGGTCTTGAAGGACATCGCCTTCAAGATCGAGCGT
GGCCAGCTGCTGGCGGTAGCCGGGAGTACGGGCGCAGGGAAGACCAGCTTGCTCATGGTGATCATGGGCGAGCTG
GAGCCTTCCGAGGGCAAGATCAAGCACAGCGGGCGGATCAGCTTCTGCTCGCAGTTCAGCTGGATCATGCCCGGT
ACCATCAAGGAGGCTATCATCTTTGGTGTCTCCTATGATGAGTACCGATATCGGAGCGTGATCAAGGCCTGCCAG
CTCGAGGAGGATATCTCCAAGTTCGCCGAGAAGGACGCCATAGTCCTCGGCGAAGGAGGTATCACCTTGAGCGGC
GGGCAGCGCGCTCGGATATCGCTGGCCAGAGCTGTATACAAGGACGCGGATCTCTACCTTCTCGACAGCCCGTTC
GGTTATCTGGACGTGCTGACCGAGAAGGAGATATTCGAGTCCTGTGTATGCAAGCTCATGGCCGCGAAGACGCGG
ATATTGGTGACCAGTAAGATGGAGCACCTCAAGAAGGCGGACAAGATCCTTATCCTGCACGAGGGGTCGTCCTAC
TTCTACGGGACCTTCAGCGAGTTGCAGGCACTTCAGCCAGACTTTTCGTCCAAGCTGATGGGGTGCGACTCCTTC
GACCAGTTCTCGGCGGAGCGTCGTGCGTCAATCTTGACGGAGACGCTCCACCGGTTCTCGTTGGAGGGGGACGCA
CCCGTCAGCTGGACGGAGACGAAAAAACAGTCTTTTAAGCAGACTGGAGAATTTGGGGAGAAGCGAAAGGCGTCA
ATCTTGGCGCCTATCGCTTCTATCCGCAAATTCTCCATTGTGCAGAAGACGCCGCTCCAGATGGCTGGTATCGAG
GAGGACTCGGACGAGCCTCTGGAGCGGCGGCTTTCCCTTGTTCCGGACTCGGAGCAAGGGGAAGCCATCTTGCCG
CGGATTTCGGTGATATCGACCGGGCCCACGCTGCAAGCGAGGCGTCGTCAGAGCGTGCTGGCTCTGATGACGCAC
TCGGTTGCGCAGGGCCAGGCGATACACCGAAAGACGACGGCAAGTACCCGTAAGGTCAGCCTGGCCCCCCAGGCT
GCCCTTACGGAACTAGACATCTACTCAAGACGACTGAGTCAGGAGACTGGACTGGAGATATCGGAGGAGATCGCC
GAGGAGGACCTGAAGGAATGCTTCTTCGACGACATGGAGAGCATTCCTGCAGTGACCACCTGGGCGACCTACCTC
CGATATATCACAGTCCACAAGTCCCTGATTTTCGTCTTGATCTGGTGTCTAGTTATCTTCCTGGCTGAAGTGGCT
GCCTCGCTGGTGGTCCTGTGGTTGTTAGGGGCGACCCCTCTGCAGGATAAGGGTGCGTCCACCCACTCGAGGGCT
GCATCTTACGCGGTCATCATCACGTCCACGTCTTCGTATTATGTGTTCTACATATATGTCGGGGTGGCGGACACG
CTGCTGGCCATGGGATTCTTCCGTGGCCTGCCGCTTGTCCACACCCTGATAACCGTGTCCAAGATCCTGCACCAC
AAGATGTTGCACAGCGTGCTCCAGGCCCCCATGAGCACGCTGGCAACATTGAAGGCGGGCGGGATCTTGGCACGG
TTCAGCAAGGACATCGCGATCCTAGACGATCTGCTGCCGCTGACGATATTCGACTTTATCCAGCTGCTGCTGATC
GTCATAGGAGCCATCGCGGTCGTTGCTGTGCTGCAGCCATATATCTTTGTGGCTACAGTGCCGGTGATAGTCGCA
TTCATCATGCTGCGAGCATATTTCCTCCAGACTTCCCAGCAACTGAAGCAGTTAGAGAGCGAAGGCCGATCTCCC
ATCTTCACTCACCTGGTCACGTCGCTCAAAGGCCTGTGGACCCTACGGGCCTTTGGGCGACAGCCTTATTTCGAG
ACCCTCTTCCATAAGGCGCTGGCCCTTCATACGGCTGCGTGGTTTTTGTACCTCTCCACTCTCCGGTGGTTCCAG
ATGAGGATCGAGATGATCTTCGTGATATTCTTTATCGCGGTGACCTTCATCTCGATCCTCACCACCGGAGAGGGA
GAGGGGCGAGTCGGCATCATATTGACGCTGGCCATGGCCATTATGAGTACTCTCCAATGGGCCGTGGCCAGCTCA
ATAGATGTCGACTCGCTCATGCGTTCCGTCAGTCGCGTGTTTAAGTTCATAGACATGCCGACTGAGGGAAAGCCC
ACAAAATCCACGAAGCCGTATAAGAACGGCCAGCTGTCCAAGGTGATGATTATTGAAGCTAGTCACGTCAAGAAG
GACGACATCTGGCCCTCCGGTGGGCAGATGACGGTGAAGGACCTCACTGCCAAGTACACGGAGGGCGGGGCCGCC
ATTCTTGAGGCGATTAGCTTCAGTATATCACCTGGACAGAGGGTGGGCTTGCTGGGCCGGACCGGGTCCGGCAAG
TCCACCCTCCTCTCCGCCTTCCTTCGCTTGCTTGCGACGGAAGGGGAGATCCAGATCGATGGGGTGTCCTGGGAT
TCCATAACGTTGCAGCAGTGGAGGAAGGCCTTCGGGGTTATACCCCAGAAGGTCTTCATCTTCTCTGGGACGTTT
CGGAAGGCCCTGGACCCCTACGAGCAGTGGAGTGACCAGGAGATCTGGAAGGTGGCCGACGAGGTCGGCCTTCGC
TCTGTGATTGAGCAGTTTCCTGGGAAGCTGGATTTTGTGCTCGTAGATGGTGGATGCGTACTATCACACGGCCAC
AAGCAGTTGATGTGCCTCGCTCGCTCCGTCTTGTCCAAGGCCAAGATCCTGCTGCTGGACGAGCCCAGCGCTCAC
CTCGATCCGGTGACGTACCAGATCATCCGGCGAACGCTGAAGCAAGCGTTCGCCGACTGCACGGTGATCTTGTGC
GAGCACCGGATCGAGGCGATGCTGGAGTGCCAGCAGTTCTTGGTCATCGAGGAGGCCAAGGTGCGGCAGTACGAC
TCGATCCAGAAGCTTCTGGCGGAGAGAAGCCTGTTCCGGCAGGCTATCTCTCCGTCAGATCGGGTCAAGTTGTTT
CCGCACCGGGCCTCCTCGAAATGCAAGTCAAAGCCGCAGATTGCGGCTTTGAAGGAGGAGACGGAGGAGGAGGTA
CAGGATACTCGCTTGTGA
>CFTR_recode-10 (SEQ ID NO: 12)
ATGCAGAGGTCCCCCCTTGAGAAGGCATCGGTCGTGTCCAAGCTGTTCTTCAGCTGGACACGACCGATCCTTCGC
AAGGGGTACCGCCAGCGACTGGAGCTATCTGATATCTATCAGATACCTTCAGTCGACTCGGCGGATAATCTGTCC
GAGAAGCTAGAGCGTGAATGGGATCGTGAGCTCGCCAGCAAGAAGAACCCGAAGCTCATAAACGCGCTCAGAAGA
TGCTTCTTCTGGCGCTTTATGTTCTACGGGATCTTCTTGTACCTTGGCGAGGTCACGAAGGCCGTTCAGCCTCTG
CTTCTCGGACGGATTATCGCTAGTTATGACCCCGATGCTAAGGAGGAGCGGTCCATCGCGATATACTTAGGCATA
GGCTTATGCCTATTGTTTATCGTGAGGACCCTCCTCCTGCATCCGGCGATCTTCGGTCTGCACCACATCGGGATG
CAGATGAGGATCGCCATGTTTTCTTTGATCTATAAGAAGACATTGAAGTTGTCGAGCCGGGTCCTCGACAAAATT
AGCATAGGGCAGCTGGTGAGCTTATTATCAGCTGCCCTAGCTAAGTTTGACGAGGGCCTGGCTCTGGCACACTTC
GTCTGGATCGCCCCATTGCAGGTGGCACTGCTAATGGGGCTGATCTGGGAGCTGCTCCAGGCTTCCGCGTTCTGT
GGTCTCGGATTTCTCATCGTTCTGGCCCTGTTCCAGGCGGGACTGGGCCGGATGATGATGAAGTACCGAGACCAG
AGAGCGGGGAAGATCTCGGAGCGGCTGGTCATAACTAGCGAGATGATCGAGAACATTCAGAGCGTGAAGGCGTAC
TGCTGGGAGGAGGCCATGGAGAAGATGATTGAAGCATTAAGGCAGACGGAGTTGAAGCTGACACGTAAGGCCGCT
TACGTGCGGTACTTCAACTCCTCTGCCTTTTTCTTCAGTGGCTTCTTCGTGGTCTTCCTCAGCGTACTGCCTTAC
GCTCTGATCAAGGGGATCATCCTTCGCAAGATCTTCACGACTATCAGCTTCTGCATCGTCCTACGGATGGCGGTG
ACCCGCCAGTTTCCGTGGGCGGTGCAGACCTGGTATGATAGTCTTGGAGCCATTGCGAAGATCCAGGACTTCTTG
CAGAAGCAGGAGTATAAGACTCTGGAGTACGCCCTCACGACCACGGAGGTGGTGATGGAGAACGTCACCGCCTTC
TGGGAGGAGGGCTTCGGGGAGTTGTTCGAGAAGGCCAAGCAGGCCAACGCCAATCGAAAGACTTCGAATGGCGAT
GACAGCTTGTTCTTCTCGAACTTCTCCCTGCTGGGCACGCCGGTCTTGAAGGACATCAACTTCAAGATCGAGCGT
GGCCAGCTCCTGGCGGTGGCCGGGAGCACGGGGGCTGGGAAGACCAGCCTCCTCATGGTGATCATGGGGGAGCTC
GAGCCAAGTGAAGGGAAGATCAAACACTCGGGCCGGATTAGTTTTTGCTCGCAGTTTTCATGGATCATGCCCGGT
ACCATCAAGGAGAACATCATCTTTGGTGTCTCCTATGATGAGTACCGGTATCGATCCGTGATAAAGGCCTGCCAG
CTCGAGGAGGATATCTCCAAGTTCGCCGAGAAGGATAACATCGTTCTCGGCGAAGGAGGTATCACCTTGAGCGGC
GGGCAGCGAGCAAGAATTAGTCTGGCCCGAGCTGTTTACAAGGATGCTGACCTTTACTTGCTCGACTCCCCCTTT
GGTTACCTTGACGTACTCACAGAGAAGGAGATCTTTGAGTCCTGCGTCTGCAAGCTGATGGCGGCCAAGACCAGG
ATCTTGGTCACCTCTAAGATGGAGCATCTTAAGAAGGCGGACAAGATCCTCATTCTGCACGAGGGGAGCTCCTAC
TTCTATGGGACGTTCAGCGAGTTGCAGAATCTTCAGCCCGATTTCTCCAGTAAGCTTATGGGCTGCGATTCGTTT
GATCAGTTCTCAGCTGAGCGGCGCAACTCCATTCTGACGGAGACCTTGCATAGGTTTTCGTTAGAAGGAGATGCG
CCGGTCAGCTGGACTGAGACGAAGAAGCAGTCCTTTAAGCAGACTGGAGAATTCGGGGAGAAGAGAAAGAACTCG
ATCCTGAACCCCATAGCAAGTATCAGGAAGTTCTCCATCGTGCAGAAAACGCCGCTCCAGATGAACGGAATCGAG
GAGGATTCCGACGAGCCTCTGGAGCGGCGGCTTTCCCTTGTTCCGGACTCGGAACAAGGGGAAGCCATCTTGCCG
CGCATCAGCGTGATCAGCACGGGGCCGACGCTGCAGGCGCGGCGTCGGCAGTCCGTGCTGGCTCTGATGACGCAC
TCTGTGGCGCAAGGGCAGGCCATCCATCGTAAGACGACCGCGTCTACGAGGAAGGTCTCCCTTGCGCCACAGGCT
GCGTTAACAGAGCTGGATATCTACAGCCGCCGTCTCTCCCAGGAGACGGGGCTGGAGATATCCGAAGAGATCGCG
GAGGAGGACTTGAAGGAGTGCTTCTTCGACGATATGGAGTCCATTCCGGCCGTGACCACATGGGCGACTTATCTA
CGGTATATTACCGTACATAAGTCATTAATTTTCGTTTTGATATGGTGTTTAGTTATTTTCCTTGCCGAAGTGGCG
GCGTCCCTAGTAGTCTTGTGGCTACTAGGGGCGACGCCACTTCAGGACAAGGGAAATAGCACACATAGTAGGAAC
GCGTCGTACGCGGTGATAATCACGTCGACGAGTTCCTACTATGTGTTCTACATCTATGTGGGGGTTGCTGACACG
TTGTTAGCGATGGGCTTCTTCAGGGGGTTACCCCTGGTCCATACGCTGATAACGGTCAGCAAGATCCTCCACCAT
AAGATGTTACACTCGGTGCTTCAAGCACCGATGAGTACGCTCGCAACATTGAAGGCTGGCGGTATCCTGAACCGT
TTCAGCAAAGATATTGCAATACTGGACGACCTGTTGCCCCTGACGATCTTCGACTTCATCCAGTTGTTGTTGATC
GTCATAGGGGCAATAGCGGTCGTCGCAGTGTTGCAGCCCTATATCTTTGTTGCGACGGTTCCGGTTATCGTCGCC
TTCATAATGTTGCGAGCGTACTTCCTCCAGACGTCCCAGCAGCTGAAGCAACTAGAGAGTGAAGGTCGGTCCCCG
ATCTTCACTCATCTAGTTACTTCGCTGAAGGGACTCTGGACGCTGAGGGCATTCGGCAGGCAGCCGTATTTTGAG
ACGCTTTTCCATAAAGCGCTCAATTTACACACGGCTGCCTGGTTCTTGTACCTCAGCACGTTACGGTGGTTCCAG
ATGAGGATAGAGATGATCTTTGTCATCTTCTTTATCGCCGTGACGTTCATCTCCATCCTCACCACCGGTGAGGGG
GAGGGCCGGGTCGGGATCATCCTGACCCTGGCCATGAACATCATGTCAACCCTTCAGTGGGCTGTCGCGAGCTCG
ATAGACGTCGACTCACTGATGCGTTCAGTGAGTCGCGTCTTCAAGTTCATCGACATGCCCACTGAAGGGAAACCT
ACGAAGAGCACCAAGCCGTACAAGAACGGCCAGCTCTCGAAGGTAATGATTATTGAGAACAGCCACGTGAAGAAG
GACGATATATGGCCTTCAGGAGGGCAGATGACAGTGAAGGACCTCACTGCCAAGTACACCGAGGGGGGCAACGCG
ATCCTCGAGGCGATATCGTTCTCGATATCGCCCGGGCAGCGCGTTGGCCTCCTCGGTCGTACTGGCAGTGGGAAG
TCCACACTGTTATCTGCCTTCCTGCGCCTTCTCGCCACTGAGGGAGAGATCCAGATTGATGGAGTCTCCTGGGAC
TCCATCACTCTCCAGCAGTGGCGGAAGGCGTTCGGTGTCATTCCGCAGAAGGTGTTCATCTTTTCGGGGACCTTC
CGGAAGGCTCTTGATCCCTACGAGCAGTGGAGCGATCAAGAGATCTGGAAGGTCGCCGATGAGGTGGGCCTGCGG
AGTGTCATCGAGCAGTTCCCCGGGAAGCTGGACTTCGTCCTTGTTGACGGAGGCTGCGTGCTGAGCCATGGGCAC
AAGCAGCTCATGTGCTTAGCACGCAGCGTCCTCAGCAAGGCGAAGATCCTGCTTCTCGATGAGCCTTCAGCTCAC
CTCGATCCGGTGACGTACCAGATCATTCGGCGAACGCTGAAGCAAGCGTTCGCCGACTGCACTGTGATCTTGTGC
GAGCACCGGATCGAGGCGATGCTGGAGTGCCAGCAGTTCCTGGTAATCGAAGAAGCGAAGGTTCGGCAGTACGAC
AGCATCCAGAAGCTGTTGGCCGAGCGTTCGCTTTTTCGACAGGCCATATCGCCTTCTGATCGCGTGAAGCTGTTC
CCGCACCGGGCCTCCTCCAAGTGTAAGTCAAAGCCGCAGATTGCGGCTTTGAAGGAGGAGACTGAGGAGGAGGTC
CAGGACACGCGGCTCTAA
>CFTR_recode-11 (SEQ ID NO: 13)
ATGCAGAGGTCCCCCCTTGAGAAGGCATCGGTCGTGTCCAAGCTGTTCTTCAGCTGGACACGACCGATCCTTCGC
AAGGGGTACCGCCAGCGACTGGAGCTATCTGATATCTATCAGATACCTTCAGTCGACTCGGCGGATAATCTGTCC
GAGAAGCTAGAGCGTGAATGGGATCGTGAGCTCGCCAGCAAGAAGAACCCGAAGCTCATAAACGCGCTCAGAAGA
TGCTTCTTCTGGCGCTTTATGTTCTACGGGATCTTCTTGTACCTTGGCGAGGTCACGAAGGCCGTTCAGCCTCTG
CTTCTCGGACGGATTATCGCTAGTTATGACCCCGATGCTAAGGAGGAGCGGTCCATCGCGATATACTTAGGCATA
GGCTTATGCCTATTGTTTATCGTGAGGACCCTCCTCCTGCATCCGGCGATCTTCGGTCTGCACCACATCGGGATG
CAGATGAGGATCGCCATGTTTTCTTTGATCTATAAGAAGACATTGAAGTTGTCGAGCCGGGTCCTCGACAAAATT
AGCATAGGGCAGCTGGTGAGCTTATTATCAGCTGCCCTAGCTAAGTTTGACGAGGGCCTGGCTCTGGCACACTTC
GTCTGGATCGCCCCATTGCAGGTGGCACTGCTAATGGGGCTGATCTGGGAGCTGCTCCAGGCTTCCGCGTTCTGT
GGTCTCGGATTTCTCATCGTTCTGGCCCTGTTCCAGGCGGGACTGGGCCGGATGATGATGAAGTACCGAGACCAG
AGAGCGGGGAAGATCTCGGAGCGGCTGGTCATAACTAGCGAGATGATCGAGAACATTCAGAGCGTGAAGGCGTAC
TGCTGGGAGGAGGCCATGGAGAAGATGATTGAAGCATTAAGGCAGACGGAGTTGAAGCTGACACGTAAGGCCGCT
TACGTGCGGTACTTCAACTCCTCTGCCTTTTTCTTCAGTGGCTTCTTCGTGGTCTTCCTCAGCGTACTGCCTTAC
GCTCTGATCAAGGGGATCATCCTTCGCAAGATCTTCACGACTATCAGCTTCTGCATCGTCCTACGGATGGCGGTG
ACCCGCCAGTTTCCGTGGGCGGTGCAGACCTGGTATGATAGTCTTGGAGCCATTGCGAAGATCCAGGACTTCTTG
CAGAAGCAGGAGTATAAGACTCTGGAGTACGCCCTCACGACCACGGAGGTGGTGATGGAGAACGTCACCGCCTTC
TGGGAGGAGGGCTTCGGGGAGTTGTTCGAGAAGGCCAAGCAGGCCAACGCCAATCGAAAGACTTCGAATGGCGAT
GACAGCTTGTTCTTCTCGAACTTCTCCCTGCTGGGCACGCCGGTCTTGAAGGACATCAACTTCAAGATCGAGCGT
GGCCAGCTCCTGGCGGTGGCCGGGAGCACGGGGGCTGGGAAGACCAGCCTCCTCATGGTGATCATGGGGGAGCTC
GAGCCAAGTGAAGGGAAGATCAAACACTCGGGCCGGATTAGTTTTTGCTCGCAGTTTTCATGGATCATGCCCGGT
ACCATCAAGGAGAACATCATCTTTGGTGTCTCCTATGATGAGTACCGGTATCGATCCGTGATAAAGGCCTGCCAG
CTCGAGGAGGATATCTCCAAGTTCGCCGAGAAGGATAACATCGTTCTCGGCGAAGGAGGTATCACCTTGAGCGGC
GGGCAGCGAGCAAGAATTAGTCTGGCCCGAGCTGTTTACAAGGATGCTGACCTTTACTTGCTCGACTCCCCCTTT
GGTTACCTTGACGTACTCACAGAGAAGGAGATCTTTGAGTCCTGCGTCTGCAAGCTGATGGCGGCCAAGACCAGG
ATCTTGGTCACCTCTAAGATGGAGCATCTTAAGAAGGCGGACAAGATCCTCATTCTGCACGAGGGGAGCTCCTAC
TTCTATGGGACGTTCAGCGAGTTGCAGAATCTTCAGCCCGATTTCTCCAGTAAGCTTATGGGCTGCGATTCGTTT
GATCAGTTCTCAGCTGAGCGGCGCAACTCCATTCTGACGGAGACCTTGCATAGGTTTTCGTTAGAAGGAGATGCG
CCGGTCAGCTGGACTGAGACGAAGAAGCAGTCCTTTAAGCAGACTGGAGAATTCGGGGAGAAGAGAAAGAACTCG
ATCCTGAACCCCATAGCAAGTATCAGGAAGTTCTCCATCGTGCAGAAAACGCCGCTCCAGATGAACGGAATCGAG
GAGGATTCCGACGAGCCTCTGGAGCGGCGGCTTTCCCTTGTTCCGGACTCGGAACAAGGGGAAGCCATCTTGCCG
CGCATCAGCGTGATCAGCACGGGGCCGACGCTGCAGGCGCGGCGTCGGCAGTCCGTGCTGGCTCTGATGACGCAC
TCTGTGGCGCAAGGGCAGGCCATCCATCGTAAGACGACCGCGTCTACGAGGAAGGTCTCCCTTGCGCCACAGGCT
GCGTTAACAGAGCTGGATATCTACAGCCGCCGTCTCTCCCAGGAGACGGGGCTGGAGATATCCGAAGAGATCGCG
GAGGAGGACTTGAAGGAGTGCTTCTTCGACGATATGGAGTCCATTCCGGCCGTGACCACATGGGCGACATACCTG
CGGTATATTACTGTCCACAAGAGCCTCATCTTTGTCTTGATATGGTGTTTAGTTATTTTCCTTGCCGAAGTGGCG
GCGTCCCTAGTAGTCTTGTGGCTACTAGGGGCGACGCCACTTCAGGACAAGGGAAATAGCACACATAGTAGGAAC
GCGTCGTACGCGGTGATAATCACGTCGACGAGTTCCTACTATGTGTTCTACATCTATGTGGGGGTTGCTGACACG
TTGTTAGCGATGGGCTTCTTCAGGGGGTTACCCCTGGTCCATACGCTGATAACGGTCAGCAAGATCCTCCACCAT
AAGATGTTACACTCGGTGCTTCAAGCACCGATGAGTACGCTCGCAACATTGAAGGCTGGCGGTATCCTGAACCGT
TTCAGCAAAGATATTGCAATACTGGACGACCTGTTGCCCCTGACGATCTTCGACTTCATCCAGTTGTTGTTGATC
GTCATAGGGGCAATAGCGGTCGTCGCAGTGTTGCAGCCCTATATCTTTGTTGCGACGGTTCCGGTTATCGTCGCC
TTCATAATGTTGCGAGCGTACTTCCTCCAGACGTCCCAGCAGCTGAAGCAACTAGAGAGTGAAGGTCGGTCCCCG
ATCTTCACTCATCTAGTTACTTCGCTGAAGGGACTCTGGACGCTGAGGGCATTCGGCAGGCAGCCGTATTTTGAG
ACGCTTTTCCATAAAGCGCTCAATTTACACACGGCTGCCTGGTTCTTGTACCTCAGCACGTTACGGTGGTTCCAG
ATGAGGATAGAGATGATCTTTGTCATCTTCTTTATCGCCGTGACGTTCATCTCCATCCTCACCACCGGTGAGGGG
GAGGGCCGGGTCGGGATCATCCTGACCCTGGCCATGAACATCATGTCAACCCTTCAGTGGGCTGTCGCGAGCTCG
ATAGACGTCGACTCACTGATGCGTTCAGTGAGTCGCGTCTTCAAGTTCATCGACATGCCCACTGAAGGGAAGCCC
ACCAAGAGTACGAAGCCGTACAAGAATGGGCAGCTGTCCAAGGTGATGATTATCGAGAATAGTCACGTCAAGAAG
GACGACATCTGGCCCTCCGGCGGTCAGATGACCGTGAAGGATCTGACCGCCAAGTACACGGAGGGCGGGAACGCC
ATTCTTGAGGCGATTAGCTTCTCGATATCACCTGGACAGCGGGTCGGCCTCCTCGGTCGCACGGGGTCGGGGAAG
AGCACTCTGCTGAGTGCTTTTCTCCGACTCCTTGCGACCGAGGGGGAGATCCAGATAGATGGGGTCTCTTGGGAC
AGTATTACGCTGCAGCAGTGGAGGAAGGCCTTCGGGGTTATACCCCAGAAGGTCTTCATATTCTCCGGGACCTTC
CGGAAGGCTCTTGATCCCTACGAGCAGTGGAGCGATCAAGAGATCTGGAAGGTCGCGGACGAAGTTGGACTGCGC
TCGGTGATAGAGCAGTTCCCCGGGAAGTTGGACTTTGTCTTGGTCGATGGAGGGTGCGTTCTGAGCCACGGCCAT
AAGCAGCTTATGTGCCTGGCTCGGAGCGTACTCTCCAAGGCCAAGATATTGCTGCTGGACGAGCCCAGCGCTCAC
CTCGATCCGGTGACGTACCAGATCATTCGGCGAACGCTGAAGCAAGCGTTCGCCGACTGCACTGTGATCTTGTGC
GAGCACCGGATCGAGGCGATGCTGGAGTGCCAGCAGTTCCTGGTGATCGAAGAGGCTAAGGTCCGCCAGTATGAT
TCGATCCAGAAGTTACTGGCGGAGCGTAGCCTCTTCCGCCAGGCCATCAGTCCAAGTGACCGGGTGAAGCTGTTC
CCTCACCGAGCGTCGTCCAAGTGTAAGTCAAAGCCGCAGATTGCGGCTTTGAAAGAAGAAACAGAGGAGGAGGTC
CAGGACACCCGCCTCTGA
>CFTR_recode-12 (SEQ ID NO: 14)
ATGCAGAGATCGCCGCTGGAGAAGGCTTCGGTCGTGTCCAAGCTGTTCTTCAGCTGGACACGACCGATCCTTCGC
AAGGGGTACCGCCAGCGACTGGAGCTATCTGATATCTATCAGATACCTTCAGTCGACTCGGCGGATAATCTGTCC
GAGAAGCTAGAGCGTGAATGGGATCGTGAGCTCGCCAGCAAGAAGAACCCGAAGCTCATAAACGCGCTCAGAAGA
TGCTTCTTCTGGCGCTTTATGTTCTACGGGATCTTCTTGTACCTTGGCGAGGTCACGAAGGCCGTTCAGCCTCTG
CTTCTCGGACGGATTATCGCTAGTTATGACCCCGATGCTAAGGAGGAGCGGTCCATCGCGATATACTTAGGCATA
GGCTTATGCCTATTGTTTATCGTGAGGACCCTCCTCCTGCATCCGGCGATCTTCGGTCTGCACCACATCGGGATG
CAGATGAGGATCGCCATGTTTTCTTTGATCTATAAGAAGACATTGAAGTTGTCGAGCCGGGTCCTCGACAAAATT
AGCATAGGGCAGCTGGTGAGCTTATTATCAGCTGCCCTAGCTAAGTTTGACGAGGGCCTGGCTCTGGCACACTTC
GTCTGGATCGCCCCATTGCAGGTGGCACTGCTAATGGGGCTGATCTGGGAGCTGCTCCAGGCTTCCGCGTTCTGT
GGTCTCGGATTTCTCATCGTTCTGGCCCTGTTCCAGGCGGGACTGGGCCGGATGATGATGAAGTACCGAGACCAG
AGAGCGGGGAAGATCTCGGAGCGGCTGGTCATAACTAGCGAGATGATCGAGAACATTCAGAGCGTGAAGGCGTAC
TGCTGGGAGGAGGCCATGGAGAAGATGATTGAAGCATTAAGGCAGACGGAGTTGAAGCTGACACGTAAGGCCGCT
TACGTGCGGTACTTCAACTCCTCTGCCTTTTTCTTCAGTGGCTTCTTCGTGGTCTTCCTCAGCGTACTGCCTTAC
GCTCTGATCAAGGGGATCATCCTTCGCAAGATCTTCACGACTATCAGCTTCTGCATCGTCCTACGGATGGCGGTG
ACCCGCCAGTTTCCGTGGGCGGTGCAGACCTGGTATGATAGTCTTGGAGCCATTGCGAAGATCCAGGACTTCTTG
CAGAAGCAGGAGTATAAGACTCTGGAGTACGCCCTCACGACCACGGAGGTGGTGATGGAGAACGTCACCGCCTTC
TGGGAGGAGGGCTTCGGGGAGTTGTTCGAGAAGGCCAAGCAGGCCAACGCCAATCGAAAGACTTCGAATGGCGAT
GACAGCTTGTTCTTCTCGAACTTCTCCCTGCTGGGCACGCCGGTCTTGAAGGACATCAACTTCAAGATCGAGCGT
GGCCAGCTCCTGGCGGTGGCCGGGAGCACGGGGGCTGGGAAGACCAGCCTCCTCATGGTGATCATGGGGGAGCTC
GAGCCAAGTGAAGGGAAGATCAAACACTCGGGCCGGATTAGTTTTTGCTCGCAGTTTTCATGGATCATGCCCGGT
ACCATCAAGGAGAACATCATCTTTGGTGTCTCCTATGATGAGTACCGGTATCGATCCGTGATAAAGGCCTGCCAG
CTCGAGGAGGATATCTCCAAGTTCGCCGAGAAGGATAACATCGTTCTCGGCGAAGGAGGTATCACCTTGAGCGGC
GGGCAGCGAGCAAGAATTAGTCTGGCCCGAGCTGTTTACAAGGATGCTGACCTTTACTTGCTCGACTCCCCCTTT
GGTTACCTTGACGTACTCACAGAGAAGGAGATCTTTGAGTCCTGCGTCTGCAAGCTGATGGCGGCCAAGACCAGG
ATCTTGGTCACCTCTAAGATGGAGCATCTTAAGAAGGCGGACAAGATCCTCATTCTGCACGAGGGGAGCTCCTAC
TTCTATGGGACGTTCAGCGAGTTGCAGAATCTTCAGCCCGATTTCTCCAGTAAGCTTATGGGCTGCGATTCGTTT
GATCAGTTCTCAGCTGAGCGGCGCAACTCCATTCTGACGGAGACCTTGCATAGGTTTTCGTTAGAAGGAGATGCG
CCGGTCAGCTGGACTGAGACGAAGAAGCAGTCCTTTAAGCAGACTGGAGAATTCGGGGAGAAGAGAAAGAACTCG
ATCCTGAACCCCATAGCAAGTATCAGGAAGTTCTCCATCGTGCAGAAAACGCCGCTCCAGATGAACGGAATCGAG
GAGGATTCCGACGAGCCTCTGGAGCGGCGGCTTTCCCTTGTTCCGGACTCGGAACAAGGGGAAGCCATCTTGCCG
CGCATCAGCGTGATCAGCACGGGGCCGACGCTGCAGGCGCGGCGTCGGCAGTCCGTGCTGGCTCTGATGACGCAC
TCTGTGGCGCAAGGGCAGGCCATCCATCGTAAGACGACCGCGTCTACGAGGAAGGTCTCCCTTGCGCCACAGGCT
GCGTTAACAGAGCTGGATATCTACAGCCGCCGTCTCTCCCAGGAGACGGGGCTGGAGATATCCGAAGAGATCGCG
GAGGAGGACTTGAAGGAGTGCTTCTTCGACGATATGGAGTCCATTCCGGCCGTGACCACATGGGCGACATACCTG
CGGTATATTACTGTCCACAAGAGCCTCATCTTTGTCTTGATATGGTGTTTAGTTATTTTCCTTGCCGAAGTGGCG
GCGTCCCTAGTAGTCTTGTGGCTACTAGGGGCGACGCCACTTCAGGACAAGGGAAATAGCACACATAGTAGGAAC
GCGTCGTACGCGGTGATAATCACGTCGACGAGTTCCTACTATGTGTTCTACATCTATGTGGGGGTTGCTGACACG
TTGTTAGCGATGGGCTTCTTCAGGGGGTTACCCCTGGTCCATACGCTGATAACGGTCAGCAAGATCCTCCACCAT
AAGATGTTACACTCGGTGCTTCAAGCACCGATGAGTACGCTCGCAACATTGAAGGCTGGCGGTATCCTGAACCGT
TTCAGCAAAGATATTGCAATACTGGACGACCTGTTGCCCCTGACGATCTTCGACTTCATCCAGTTGTTGTTGATC
GTCATAGGGGCAATAGCGGTCGTCGCAGTGTTGCAGCCCTATATCTTTGTTGCGACGGTTCCGGTTATCGTCGCC
TTCATAATGTTGCGAGCGTACTTCCTCCAGACGTCCCAGCAGCTGAAGCAACTAGAGAGTGAAGGTCGGTCCCCG
ATCTTCACTCATCTAGTTACTTCGCTGAAGGGACTCTGGACGCTGAGGGCATTCGGCAGGCAGCCGTATTTTGAG
ACGCTTTTCCATAAAGCGCTCAATTTACACACGGCTGCCTGGTTCTTGTACCTCAGCACGTTACGGTGGTTCCAG
ATGAGGATAGAGATGATCTTTGTCATCTTCTTTATCGCCGTGACGTTCATCTCCATCCTCACCACCGGTGAGGGG
GAGGGCCGGGTCGGGATCATCCTGACCCTGGCCATGAACATCATGTCAACCCTTCAGTGGGCTGTCGCGAGCTCG
ATAGACGTCGACTCACTGATGCGTTCAGTGAGTCGCGTCTTCAAGTTCATCGACATGCCCACTGAAGGGAAGCCC
ACCAAGAGTACGAAGCCGTACAAGAATGGGCAGCTGTCCAAGGTGATGATTATCGAGAATAGTCACGTCAAGAAG
GACGACATCTGGCCCTCCGGCGGTCAGATGACCGTGAAGGATCTGACCGCCAAGTACACGGAGGGCGGGAACGCC
ATTCTTGAGGCGATTAGCTTCTCGATATCACCTGGACAGCGGGTCGGCCTCCTCGGTCGCACGGGGTCGGGGAAG
AGCACTCTGCTGAGTGCTTTTCTCCGACTCCTTGCGACCGAGGGGGAGATCCAGATAGATGGGGTCTCTTGGGAC
AGTATTACGCTGCAGCAGTGGAGGAAGGCCTTCGGGGTTATACCCCAGAAGGTCTTCATATTCTCCGGGACCTTC
CGGAAGGCTCTTGATCCCTACGAGCAGTGGAGCGATCAAGAGATCTGGAAGGTCGCGGACGAAGTTGGACTGCGC
TCGGTGATAGAGCAGTTCCCCGGGAAGTTGGACTTTGTCTTGGTCGATGGAGGGTGCGTTCTGAGCCACGGCCAT
AAGCAGCTTATGTGCCTGGCTCGGAGCGTACTCTCCAAGGCCAAGATATTGCTGCTGGACGAGCCCAGCGCTCAC
CTCGATCCGGTGACGTACCAGATCATTCGGCGAACGCTGAAGCAAGCGTTCGCCGACTGCACTGTGATCTTGTGC
GAGCACCGGATCGAGGCGATGCTGGAGTGCCAGCAGTTCCTGGTGATCGAAGAGGCTAAGGTCCGCCAGTATGAT
TCGATCCAGAAGTTATTGGCCGAGCGAAGCCTTTTCCGGCAGGCGATCTCTCCAAGCGACCGGGTGAAGCTGTTT
CCTCATCGGGCCTCCTCCAAGTGCAAGTCAAAGCCGCAGATTGCGGCTTTGAAGGAGGAGACCGAGGAGGAAGTG
CAGGACACCCGGTTGTAA
>ATP7B (SEQ ID NO: 15)
ATGCCTGAGCAGGAGAGACAGATCACAGCCAGAGAAGGGGCCAGTCGGAAAATCTTATCTAAGCTTTCTTTGCCT
ACCCGTGCCTGGGAACCAGCAATGAAGAAGAGTTTTGCTTTTGACAATGTTGGCTATGAAGGTGGTCTGGATGGC
CTGGGCCCTTCTTCTCAGGTGGCCACCAGCACAGTCAGGATCTTGGGCATGACTTGCCAGTCATGTGTGAAGTCC
ATTGAGGACAGGATTTCCAATTTGAAAGGCATCATCAGCATGAAGGTTTCCCTGGAACAAGGCAGTGCCACTGTG
AAATATGTGCCATCGGTTGTGTGCCTGCAACAGGTTTGCCATCAAATTGGGGACATGGGCTTCGAGGCCAGCATT
GCAGAAGGAAAGGCAGCCTCCTGGCCCTCAAGGTCCTTGCCTGCCCAGGAGGCTGTGGTCAAGCTCCGGGTGGAG
GGCATGACCTGCCAGTCCTGTGTCAGCTCCATTGAAGGCAAGGTCCGGAAACTGCAAGGAGTAGTGAGAGTCAAA
GTCTCACTCAGCAACCAAGAGGCCGTCATCACTTATCAGCCTTATCTCATTCAGCCCGAAGACCTCAGGGACCAT
GTAAATGACATGGGATTTGAAGCTGCCATCAAGAGCAAAGTGGCTCCCTTAAGCCTGGGACCAATTGATATTGAG
CGGTTACAAAGCACTAACCCAAAGAGACCTTTATCTTCTGCTAACCAGAATTTTAATAATTCTGAGACCTTGGGG
CACCAAGGAAGCCATGTGGTCACCCTCCAACTGAGAATAGATGGAATGCATTGTAAGTCTTGCGTCTTGAATATT
GAAGAAAATATTGGCCAGCTCCTAGGGGTTCAAAGTATTCAAGTGTCCTTGGAGAACAAAACTGCCCAAGTAAAG
TATGACCCTTCTTGTACCAGCCCAGTGGCTCTGCAGAGGGCTATCGAGGCACTTCCACCTGGGAATTTTAAAGTT
TCTCTTCCTGATGGAGCCGAAGGGAGTGGGACAGATCACAGGTCTTCCAGTTCTCATTCCCCTGGCTCCCCACCG
AGAAACCAGGTCCAGGGCACATGCAGTACCACTCTGATTGCCATTGCCGGCATGACCTGTGCATCCTGTGTCCAT
TCCATTGAAGGCATGATCTCCCAACTGGAAGGGGTGCAGCAAATATCGGTGTCTTTGGCCGAAGGGACTGCAACA
GTTCTTTATAATCCCTCTGTAATTAGCCCAGAAGAACTCAGAGCTGCTATAGAAGACATGGGATTTGAGGCTTCA
GTCGTTTCTGAAAGCTGTTCTACTAACCCTCTTGGAAACCACAGTGCTGGGAATTCCATGGTGCAAACTACAGAT
GGTACACCTACATCTGTGCAGGAAGTGGCTCCCCACACTGGGAGGCTCCCTGCAAACCATGCCCCGGACATCTTG
GCAAAGTCCCCACAATCAACCAGAGCAGTGGCACCGCAGAAGTGCTTCTTACAGATCAAAGGCATGACCTGTGCA
TCCTGTGTGTCTAACATAGAAAGGAATCTGCAGAAAGAAGCTGGTGTTCTCTCCGTGTTGGTTGCCTTGATGGCA
GGAAAGGCAGAGATCAAGTATGACCCAGAGGTCATCCAGCCCCTCGAGATAGCTCAGTTCATCCAGGACCTGGGT
TTTGAGGCAGCAGTCATGGAGGACTACGCAGGCTCCGATGGCAACATTGAGCTGACAATCACAGGGATGACCTGC
GCGTCCTGTGTCCACAACATAGAGTCCAAACTCACGAGGACAAATGGCATCACTTATGCCTCCGTTGCCCTTGCC
ACCAGCAAAGCCCTTGTTAAGTTTGACCCGGAAATTATCGGTCCACGGGATATTATCAAAATTATTGAGGAAATT
GGCTTTCATGCTTCCCTGGCCCAGAGAAACCCCAACGCTCATCACTTGGACCACAAGATGGAAATAAAGCAGTGG
AAGAAGTCTTTCCTGTGCAGCCTGGTGTTTGGCATCCCTGTCATGGCCTTAATGATCTATATGCTGATACCCAGC
AACGAGCCCCACCAGTCCATGGTCCTGGACCACAACATCATTCCAGGACTGTCCATTCTAAATCTCATCTTCTTT
ATCTTGTGTACCTTTGTCCAGCTCCTCGGTGGGTGGTACTTCTACGTTCAGGCCTACAAATCTCTGAGACACAGG
TCAGCCAACATGGACGTGCTCATCGTCCTGGCCACAAGCATTGCTTATGTTTATTCTCTGGTCATCCTGGTGGTT
GCTGTGGCTGAGAAGGCGGAGAGGAGCCCTGTGACATTCTTCGACACGCCCCCCATGCTCTTTGTGTTCATTGCC
CTGGGCCGGTGGCTGGAACACTTGGCAAAGAGCAAAACCTCAGAAGCCCTGGCTAAACTCATGTCTCTCCAAGCC
ACAGAAGCCACCGTTGTGACCCTTGGTGAGGACAATTTAATCATCAGGGAGGAGCAAGTCCCCATGGAGCTGGTG
CAGCGGGGCGATATCGTCAAGGTGGTCCCTGGGGGAAAGTTTCCAGTGGATGGGAAAGTCCTGGAAGGCAATACC
ATGGCTGATGAGTCCCTCATCACAGGAGAAGCCATGCCAGTCACTAAGAAACCCGGAAGCACTGTAATTGCGGGG
TCTATAAATGCACATGGCTCTGTGCTCATTAAAGCTACCCACGTGGGCAATGACACCACTTTGGCTCAGATTGTG
AAACTGGTGGAAGAGGCTCAGATGTCAAAGGCACCCATTCAGCAGCTGGCTGACCGGTTTAGTGGATATTTTGTC
CCATTTATCATCATCATGTCAACTTTGACGTTGGTGGTATGGATTGTAATCGGTTTTATCGATTTTGGTGTTGTT
CAGAGATACTTTCCTAACCCCAACAAGCACATCTCCCAGACAGAGGTGATCATCCGGTTTGCTTTCCAGACGTCC
ATCACGGTGCTGTGCATTGCCTGCCCCTGCTCCCTGGGGCTGGCCACGCCCACGGCTGTCATGGTGGGCACCGGG
GTGGCCGCGCAGAACGGCATCCTCATCAAGGGAGGCAAGCCCCTGGAGATGGCGCACAAGATAAAGACTGTGATG
TTTGACAAGACTGGCACCATTACCCATGGCGTCCCCAGGGTCATGCGGGTGCTCCTGCTGGGGGATGTGGCCACA
CTGCCCCTCAGGAAGGTTCTGGCTGTGGTGGGGACTGCGGAGGCCAGCAGTGAACACCCCTTGGGCGTGGCAGTC
ACCAAATACTGTAAAGAGGAACTTGGAACAGAGACCTTGGGATACTGCACGGACTTCCAGGCAGTGCCAGGCTGT
GGAATTGGGTGCAAAGTCAGCAACGTGGAAGGCATCCTGGCCCACAGTGAGCGCCCTTTGAGTGCACCGGCCAGT
CACCTGAATGAGGCTGGCAGCCTTCCCGCAGAAAAAGATGCAGTCCCCCAGACCTTCTCTGTGCTGATTGGAAAC
CGTGAGTGGCTGAGGCGCAACGGTTTAACCATTTCTAGCGATGTCAGTGACGCTATGACAGACCACGAGATGAAA
GGACAGACAGCCATCCTGGTGGCTATTGACGGTGTGCTCTGTGGGATGATCGCAATCGCAGACGCTGTCAAGCAG
GAGGCTGCCCTGGCTGTGCACACGCTGCAGAGCATGGGTGTGGACGTGGTTCTGATCACGGGGGACAACCGGAAG
ACAGCCAGAGCTATTGCCACCCAGGTTGGCATCAACAAAGTCTTTGCAGAGGTGCTGCCTTCGCACAAGGTGGCC
AAGGTCCAGGAGCTCCAGAATAAAGGGAAGAAAGTCGCCATGGTGGGGGATGGGGTCAATGACTCCCCGGCCTTG
GCCCAGGCAGACATGGGTGTGGCCATTGGCACCGGCACGGATGTGGCCATCGAGGCAGCCGACGTCGTCCTTATC
AGAAATGATTTGCTGGATGTGGTGGCTAGCATTCACCTTTCCAAGAGGACTGTCCGAAGGATACGCATCAACCTG
GTCCTGGCACTGATTTATAACCTGGTTGGGATACCCATTGCAGCAGGTGTCTTCATGCCCATCGGCATTGTGCTG
CAGCCCTGGATGGGCTCAGCGGCCATGGCAGCCTCCTCTGTGTCTGTGGTGCTCTCATCCCTGCAGCTCAAGTGC
TATAAGAAGCCTGACCTGGAGAGGTATGAGGCACAGGCGCATGGCCACATGAAGCCCCTGACGGCATCCCAGGTC
AGTGTGCACATAGGCATGGATGACAGGTGGCGGGACTCCCCCAGGGCCACACCATGGGACCAGGTCAGCTATGTC
AGCCAGGTGTCGCTGTCCTCCCTGACGTCCGACAAGCCATCTCGGCACAGCGCTGCAGCAGACGATGATGGGGAC
AAGTGGTCTCTGCTCCTGAATGGCAGGGATGAGGAGCAGTACATCTGA
>ATP7A (SEQ ID NO: 16)
ATGGATCCAAGTATGGGTGTGAATTCTGTTACCATTTCTGTTGAGGGTATGACTTGCAATTCCTGTGTTTGGACC
ATTGAGCAGCAGATTGGAAAAGTGAATGGTGTGCATCACATTAAGGTATCACTGGAAGAAAAAAATGCAACTATT
ATTTATGACCCTAAACTACAGACTCCAAAGACCCTACAGGAAGCTATTGATGACATGGGCTTTGATGCTGTTATC
CATAATCCTGACCCTCTCCCTGTTTTAACTGACACCTTGTTTCTGACTGTTACGGCGTCACTGACTTTGCCATGG
GACCATATCCAAAGCACATTGCTGAAGACCAAGGGTGTGACAGACATTAAAATTTACCCTCAGAAAAGAACTGTA
GCAGTGACAATAATCCCTTCTATAGTGAATGCCAATCAGATAAAAGAGCTGGTTCCAGAACTCAGTTTAGATACT
GGGACACTGGAGAAAAAGTCAGGAGCTTGTGAAGATCATAGTATGGCTCAAGCTGGTGAAGTCGTGCTGAAGATG
AAAGTGGAAGGGATGACCTGCCATTCATGTACTAGCACTATTGAAGGAAAAATTGGGAAACTGCAAGGTGTTCAG
CGAATTAAAGTCTCCCTGGACAATCAAGAAGCTACTATTGTTTATCAACCTCATCTTATCTCAGTAGAGGAAATG
AAAAAGCAGATTGAAGCTATGGGCTTTCCAGCATTTGTCAAAAAGCAGCCCAAGTACCTCAAATTGGGAGCTATT
GATGTAGAACGTCTAAAGAACACACCAGTTAAATCCTCAGAAGGGTCACAGCAAAGGAGTCCATCATATACCAAT
GATTCAACAGCCACTTTCATCATTGATGGCATGCATTGTAAATCATGTGTGTCAAATATTGAAAGTACTTTATCT
GCACTCCAATATGTAAGCAGCATAGTAGTTTCTTTAGAGAATAGGTCTGCCATTGTGAAGTATAATGCAAGCTCA
GTCACTCCAGAATCCCTGAGAAAAGCAATAGAGGCTGTATCACCGGGGCTATATAGAGTTAGTATCACAAGTGAA
GTTGAGAGTACCTCAAACTCTCCCTCCAGCTCATCTCTTCAGAAGATTCCTTTGAATGTAGTTAGCCAGCCTCTG
ACACAAGAAACTGTGATAAACATTGATGGCATGACTTGTAATTCCTGTGTGCAGTCTATTGAGGGTGTCATATCA
AAAAAGCCAGGTGTAAAATCCATACGAGTCTCCCTTGCAAATAGCAATGGGACTGTTGAGTATGATCCTCTACTA
ACCTCTCCAGAAACGTTGAGAGGAGCAATAGAAGACATGGGATTTGATGCTACCTTGTCAGACACGAATGAGCCG
TTGGTAGTAATAGCTCAGCCTTCATCGGAAATGCCGCTTTTGACTTCAACTAATGAATTTTATACTAAAGGGATG
ACACCAGTTCAAGACAAGGAGGAAGGAAAGAATTCATCTAAGTGTTACATACAGGTCACTGGCATGACTTGCGCT
TCCTGTGTAGCAAACATTGAACGGAATTTAAGGCGGGAAGAAGGAATATATTCTATACTTGTGGCCCTGATGGCT
GGCAAGGCAGAAGTAAGGTATAATCCTGCTGTTATACAACCCCCAATGATAGCAGAGTTCATCCGAGAACTTGGA
TTTGGAGCCACTGTGATAGAAAATGCTGATGAAGGAGATGGTGTTTTGGAACTTGTTGTGAGGGGAATGACGTGT
GCCTCCTGCGTACATAAAATAGAGTCTAGTCTCACAAAACACAGAGGGATCCTATACTGCTCCGTGGCCCTGGCA
ACCAACAAAGCACATATTAAATATGACCCAGAAATTATTGGTCCTAGAGATATTATCCATACAATTGAAAGCTTA
GGTTTTGAAGCTTCTTTGGTCAAGAAGGATCGGTCAGCAAGTCACTTAGATCATAAACGAGAAATAAGACAATGG
AGACGGTCTTTTCTTGTGAGTCTGTTTTTCTGTATTCCTGTAATGGGGCTGATGATATATATGATGGTTATGGAC
CACCACTTTGCAACTCTTCACCATAATCAAAACATGAGTAAAGAAGAAATGATCAACCTTCATTCTTCTATGTTC
CTGGAGCGCCAGATTCTTCCAGGATTGTCTGTTATGAATTTGCTGTCCTTTTTATTGTGTGTACCTGTACAGTTT
TTCGGAGGCTGGTACTTCTACATTCAGGCTTATAAAGCACTGAAGCATAAGACAGCAAATATGGACGTACTGATT
GTGCTGGCAACCACCATTGCATTTGCCTACTCTTTGATTATTCTTCTAGTTGCAATGTATGAGAGAGCCAAAGTG
AACCCTATTACTTTCTTTGACACACCCCCTATGCTGTTTGTGTTTATTGCACTAGGCCGATGGCTGGAACATATA
GCAAAGGGCAAAACATCAGAGGCTCTTGCAAAGTTAATTTCACTACAAGCTACAGAAGCAACTATTGTAACTCTT
GATTCTGATAATATCCTCCTCAGTGAAGAACAAGTGGATGTGGAACTTGTACAACGTGGAGATATCATTAAAGTA
GTTCCAGGAGGCAAATTTCCAGTGGATGGTCGTGTTATTGAAGGACATTCTATGGTAGATGAGTCCCTCATCACA
GGGGAGGCAATGCCTGTGGCTAAGAAACCTGGCAGCACAGTGATTGCTGGTTCCATTAACCAGAACGGGTCACTG
CTTATCTGCGCAACACATGTTGGAGCAGACACAACCCTTTCTCAAATTGTCAAACTTGTGGAAGAGGCACAAACA
TCAAAGGCTCCTATCCAGCAGTTTGCAGACAAACTCAGTGGCTATTTTGTTCCTTTTATTGTTTTTGTTTCCATT
GCCACCCTCTTGGTATGGATTGTAATTGGATTTCTGAATTTTGAAATTGTGGAAACCTACTTTCCTGGCTACAAT
AGAAGTATCTCCCGAACAGAAACGATAATACGATTTGCTTTCCAAGCCTCTATCACAGTTCTGTGTATTGCATGT
CCCTGTTCACTGGGACTGGCCACTCCAACTGCTGTGATGGTGGGTACAGGAGTAGGTGCTCAAAATGGCATACTA
ATAAAAGGTGGAGAGCCATTGGAGATGGCTCATAAGGTAAAGGTAGTGGTATTTGATAAGACTGGAACCATTACT
CACGGAACCCCAGTGGTGAATCAAGTAAAGGTTCTAACTGAAAGTAACAGAATATCACACCATAAAATCTTGGCC
ATTGTGGGAACTGCTGAAAGTAACAGTGAACACCCTCTAGGAACAGCCATAACCAAATATTGCAAACAGGAGCTG
GACACTGAAACCTTGGGTACCTGCATAGATTTCCAGGTTGTGCCAGGCTGTGGTATTAGCTGTAAAGTCACCAAT
ATTGAAGGCTTGCTACATAAGAATAACTGGAATATAGAGGACAATAATATTAAAAATGCATCCCTGGTTCAAATT
GATGCCAGTAATGAACAGTCATCAACTTCGTCTTCCATGATTATTGATGCCCAGATCTCAAATGCTCTTAATGCT
CAGCAGTATAAAGTCCTCATTGGTAACCGGGAGTGGATGATTAGAAATGGTCTTGTCATTAATAACGATGTAAAT
GATTTCATGACTGAACATGAGAGAAAAGGTCGGACTGCTGTATTAGTAGCAGTTGATGATGAGCTGTGTGGCTTG
ATAGCCATTGCAGACACAGTGAAGCCTGAAGCAGAACTGGCTATCCATATTCTGAAATCTATGGGCTTAGAAGTA
GTTCTGATGACTGGAGACAACAGTAAAACAGCTAGATCTATTGCTTCTCAGGTTGGCATTACTAAGGTGTTTGCT
GAAGTTCTACCTTCTCACAAGGTTGCTAAAGTGAAGCAACTTCAAGAGGAGGGGAAACGGGTAGCAATGGTGGGA
GATGGAATCAATGACTCCCCAGCTCTGGCAATGGCTAATGTGGGAATTGCTATTGGCACAGGCACAGATGTAGCC
ATTGAAGCAGCTGATGTGGTTTTGATAAGGAATGATCTTCTGGATGTAGTGGCAAGTATTGACTTATCAAGAAAG
ACAGTCAAGAGGATTCGGATAAATTTTGTCTTTGCTCTAATTTATAATCTGGTTGGAATTCCCATAGCTGCTGGA
GTTTTTATGCCCATTGGTTTGGTTTTGCAGCCCTGGATGGGATCTGCAGCAATGGCTGCTTCATCTGTTTCTGTA
GTACTTTCTTCTCTCTTCCTTAAACTTTACAGGAAACCAACTTACGAGAGTTATGAACTGCCTGCCCGGAGCCAG
ATAGGACAGAAGAGTCCTTCAGAAATCAGCGTTCATGTTGGAATAGATGATACCTCAAGGAATTCTCCTAAACTG
GGTTTGCTGGACCGGATTGTTAATTATAGCAGAGCCTCTATAAACTCACTACTGTCTGATAAACGCTCCCTAAAC
AGTGTTGTTACCAGTGAACCTGACAAGCACTCACTCCTGGTGGGAGACTTCAGGGAAGATGATGACACTGCATTA
TAA
>AGL (SEQ ID NO: 17)
ATGGGACACAGTAAACAGATTCGAATTTTACTTCTGAACGAAATGGAGAAACTGGAAAAGACCCTCTTCAGACTT
GAACAAGGGTATGAGCTACAGTTCCGATTAGGCCCAACTTTACAGGGAAAAGCAGTTACCGTGTATACAAATTAC
CCATTTCCTGGAGAAACATTTAATAGAGAAAAATTCCGTTCTCTGGATTGGGAAAATCCAACAGAAAGAGAAGAT
GATTCTGATAAATACTGTAAACTTAATCTGCAACAATCTGGTTCATTTCAGTATTATTTCCTTCAAGGAAATGAG
AAAAGTGGTGGAGGTTACATAGTTGTGGACCCCATTTTACGTGTTGGTGCTGATAATCATGTGCTACCCTTGGAC
TGTGTTACTCTTCAGACATTTTTAGCTAAGTGTTTGGGACCTTTTGATGAATGGGAAAGCAGACTTAGGGTTGCA
AAAGAATCAGGCTACAACATGATTCATTTTACCCCATTGCAGACTCTTGGACTATCTAGGTCATGCTACTCCCTT
GCCAATCAGTTAGAATTAAATCCTGACTTTTCAAGACCTAATAGAAAGTATACCTGGAATGATGTTGGACAGCTA
GTGGAAAAATTAAAAAAGGAATGGAATGTTATTTGTATTACTGATGTTGTCTACAATCATACTGCTGCTAATAGT
AAATGGATCCAGGAACATCCAGAATGTGCCTATAATCTTGTGAATTCTCCACACTTAAAACCTGCCTGGGTCTTA
GACAGAGCACTTTGGCGTTTCTCCTGTGATGTTGCAGAAGGGAAATACAAAGAAAAGGGAATACCTGCTTTGATT
GAAAATGATCACCATATGAATTCCATCCGAAAAATAATTTGGGAGGATATTTTTCCAAAGCTTAAACTCTGGGAA
TTTTTCCAAGTAGATGTCAACAAAGCGGTTGAGCAATTTAGAAGACTTCTTACACAAGAAAATAGGCGAGTAACC
AAGTCTGATCCAAACCAACACCTTACGATTATTCAAGATCCTGAATACAGACGGTTTGGCTGTACTGTAGATATG
AACATTGCACTAACGACTTTCATACCACATGACAAGGGGCCAGCAGCAATTGAAGAATGCTGTAATTGGTTTCAT
AAAAGAATGGAGGAATTAAATTCAGAGAAGCATCGACTCATTAACTATCATCAGGAACAGGCAGTTAATTGCCTT
TTGGGAAATGTGTTTTATGAACGACTGGCTGGCCATGGTCCAAAACTAGGACCTGTCACTAGAAAGCATCCTTTA
GTTACCAGGTATTTTACTTTCCCATTTGAAGAGATAGACTTCTCCATGGAAGAATCTATGATTCATCTGCCAAAT
AAAGCTTGTTTTCTGATGGCACACAATGGATGGGTAATGGGAGATGATCCTCTTCGAAACTTTGCTGAACCGGGT
TCAGAAGTTTACCTAAGGAGAGAACTTATTTGCTGGGGAGACAGTGTTAAATTACGCTATGGGAATAAACCAGAG
GACTGTCCTTATCTCTGGGCACACATGAAAAAATACACTGAAATAACTGCAACTTATTTCCAGGGAGTACGTCTT
GATAACTGCCACTCAACACCTCTTCACGTAGCTGAGTACATGTTGGATGCTGCTAGGAATTTGCAACCCAATTTA
TATGTAGTAGCTGAACTGTTCACAGGAAGTGAAGATCTGGACAATGTCTTTGTTACTAGACTGGGCATTAGTTCC
TTAATAAGAGAGGCAATGAGTGCATATAATAGTCATGAAGAGGGCAGATTAGTTTACCGATATGGAGGAGAACCT
GTTGGATCCTTTGTTCAGCCCTGTTTGAGGCCTTTAATGCCAGCTATTGCACATGCCCTGTTTATGGATATTACG
CATGATAATGAGTGTCCTATTGTGCATAGATCAGCGTATGATGCTCTTCCAAGTACTACAATTGTTTCTATGGCA
TGTTGTGCTAGTGGAAGTACAAGAGGCTATGATGAATTAGTGCCTCATCAGATTTCAGTGGTTTCTGAAGAACGG
TTTTACACTAAGTGGAATCCTGAAGCATTGCCTTCAAACACAGGTGAAGTTAATTTCCAAAGCGGCATTATTGCA
GCCAGGTGTGCTATCAGTAAACTTCATCAGGAGCTTGGAGCCAAGGGTTTTATTCAGGTGTATGTGGATCAAGTT
GATGAAGACATAGTGGCAGTAACAAGACACTCACCTAGCATCCATCAGTCTGTTGTGGCTGTATCTAGAACTGCT
TTCAGGAATCCCAAGACTTCATTTTACAGCAAGGAAGTGCCTCAAATGTGCATCCCTGGCAAAATTGAAGAAGTA
GTTCTTGAAGCTAGAACTATTGAGAGAAACACGAAACCTTATAGGAAGGATGAGAATTCAATCAATGGAACACCA
GATATCACAGTAGAAATTAGAGAACATATTCAGCTTAATGAAAGTAAAATTGTTAAACAAGCTGGAGTTGCCACA
AAAGGGCCCAATGAATATATTCAAGAAATAGAATTTGAAAACTTGTCTCCAGGAAGTGTTATTATATTCAGAGTT
AGTCTTGATCCACATGCACAAGTCGCTGTTGGAATTCTTCGAAATCATCTGACACAATTCAGTCCTCACTTTAAA
TCTGGCAGCCTAGCTGTTGACAATGCAGATCCTATATTAAAAATTCCTTTTGCTTCTCTTGCCTCCAGATTAACT
TTGGCTGAGCTAAATCAGATCCTTTACCGATGTGAATCAGAAGAAAAGGAAGATGGTGGAGGGTGCTATGACATA
CCAAACTGGTCAGCCCTTAAATATGCAGGTCTTCAAGGTTTAATGTCTGTATTGGCAGAAATAAGACCAAAGAAT
GACTTGGGGCATCCTTTTTGTAATAATTTGAGATCTGGAGATTGGATGATTGACTATGTCAGTAACCGGCTTATT
TCACGATCAGGAACTATTGCTGAAGTTGGTAAATGGTTGCAGGCTATGTTCTTCTACCTGAAGCAGATCCCACGT
TACCTTATCCCATGTTACTTTGATGCTATATTAATTGGTGCATATACCACTCTTCTGGATACAGCATGGAAGCAG
ATGTCAAGCTTTGTTCAGAATGGTTCAACCTTTGTGAAACACCTTTCATTGGGTTCAGTTCAACTGTGTGGAGTA
GGAAAATTCCCTTCCCTGCCAATTCTTTCACCTGCCCTAATGGATGTACCTTATAGGTTAAATGAGATCACAAAA
GAAAAGGAGCAATGTTGTGTTTCTCTAGCTGCAGGCTTACCTCATTTTTCTTCTGGTATTTTCCGCTGCTGGGGA
AGGGATACTTTTATTGCACTTAGAGGTATACTGCTGATTACTGGACGCTATGTAGAAGCCAGGAATATTATTTTA
GCATTTGCGGGTACCCTGAGGCATGGTCTCATTCCTAATCTACTGGGTGAAGGAATTTATGCCAGATACAATTGT
CGGGATGCTGTGTGGTGGTGGCTGCAGTGTATCCAGGATTACTGTAAAATGGTTCCAAATGGTCTAGACATTCTC
AAGTGCCCAGTTTCCAGAATGTATCCTACAGATGATTCTGCTCCTTTGCCTGCTGGCACACTGGATCAGCCATTG
TTTGAAGTCATACAGGAAGCAATGCAAAAACACATGCAGGGCATACAGTTCCGAGAAAGGAATGCTGGTCCCCAG
ATAGATCGAAACATGAAGGACGAAGGTTTTAATATAACTGCAGGAGTTGATGAAGAAACAGGATTTGTTTATGGA
GGAAATCGTTTCAATTGTGGCACATGGATGGATAAAATGGGAGAAAGTGACAGAGCTAGAAACAGAGGAATCCCA
GCCACACCAAGAGATGGGTCTGCTGTGGAAATTGTGGGCCTGAGTAAATCTGCTGTTCGCTGGTTGCTGGAATTA
TCCAAAAAAAATATTTTCCCTTATCATGAAGTCACAGTAAAAAGACATGGAAAGGCTATAAAGGTCTCATATGAT
GAGTGGAACAGAAAAATACAAGACAACTTTGAAAAGCTATTTCATGTTTCCGAAGACCCTTCAGATTTAAATGAA
AAGCATCCAAATCTGGTTCACAAACGTGGCATATACAAAGATAGTTATGGAGCTTCAAGTCCTTGGTGTGACTAT
CAGCTCAGGCCTAATTTTACCATAGCAATGGTTGTGGCCCCTGAGCTCTTTACTACAGAAAAAGCATGGAAAGCT
TTGGAGATTGCAGAAAAAAAATTGCTTGGTCCCCTTGGCATGAAAACTTTAGATCCAGATGATATGGTTTACTGT
GGAATTTATGACAATGCATTAGACAATGACAACTACAATCTTGCTAAAGGTTTCAATTATCACCAAGGACCTGAG
TGGCTGTGGCCTATTGGGTATTTTCTTCGTGCAAAATTATATTTTTCCAGATTGATGGGCCCGGAGACTACTGCA
AAGACTATAGTTTTGGTTAAAAATGTTCTTTCCCGACATTATGTTCATCTTGAGAGATCCCCTTGGAAAGGACTT
CCAGAACTGACCAATGAGAATGCCCAGTACTGTCCTTTCAGCTGTGAAACACAAGCCTGGTCAATTGCTACTATT
CTTGAGACACTTTATGATTTATAG
>DMD_mingene (SEQ ID NO: 18)
ATGCTTTGGTGGGAAGAAGTAGAGGACTGTTATGAAAGAGAAGATGTTCAAAAGAAAACATTCACAAAATGGGTA
AATGCACAATTTTCTAAGTTTGGGAAGCAGCATATTGAGAACCTCTTCAGTGACCTACAGGATGGGAGGCGCCTC
CTAGACCTCCTCGAAGGCCTGACAGGGCAAAAACTGCCAAAAGAAAAAGGATCCACAAGAGTTCATGCCCTGAAC
AATGTCAACAAGGCACTGCGGGTTTTGCAGAACAATAATGTTGATTTAGTGAATATTGGAAGTACTGACATCGTA
GATGGAAATCATAAACTGACTCTTGGTTTGATTTGGAATATAATCCTCCACTGGCAGGTCAAAAATGTAATGAAA
AATATCATGGCTGGATTGCAACAAACCAACAGTGAAAAGATTCTCCTGAGCTGGGTCCGACAATCAACTCGTAAT
TATCCACAGGTTAATGTAATCAACTTCACCACCAGCTGGTCTGATGGCCTGGCTTTGAATGCTCTCATCCATAGT
CATAGGCCAGACCTATTTGACTGGAATAGTGTGGTTTGGCAGCAGTCAGCCACACAACGACTGGAACATGCATTC
AACATCGCCAGATATCAATTAGGCATAGAGAAAGTACTCGATCCTGAAGATGTTGATACCACCTATCCAGATAAG
AAGTCCATCTTAATGTACATCACATCACTCTTCCAAGTTTTGCCTCAACAAGTGAGCATTGAAGCCATCCAGGAA
GTGGAAATGTTGCCAAGGCCACCTAAAGTGACTAAAGAAGAACATTTTCAGTACATCATCAAATGCACTATTCTC
AACAGATCACGGTCAGTCTAGCACAGGGATATGAGAGAACTTCTTCCCCTAAGCCTCGATTCAAGAGCTATGCCT
ACACACAGGCTGCTTATGTCACCACCTCTGACCCTACACGGAGCCCATTTCCTTCACAGCATTTGGAAGCTCCTG
AAGACAAGTCATTTGGCAGTTCATTGATGGAGAGTGAAGTAAACCTGGACCGTTATCAAACAGCTTTAGAAGAAG
TATTATCGTGGCTTCTTTCTGCTGAGGACACATTGCAAGCACAAGGAGAGATTTCTAATGATGTGGAAGTGGTGA
AAGACCAGTTTCATACTCATGAGGGGTACATGATGGATTTGACAGCCCATCAGGGCCGGGTTGGTAATATTCTAC
AATTGGGAAGTAAGCTGATTGGAACAGGAAAATTATCAGAAGATGAAGAAACTGAAGTACAAGAGCAGATGAATC
TCCTAAATTCAAGATGGGAATGCCTCAGGGTAGCTAGCATGGAAAAACAAAGCAATTTACATAGAGTTTTAATGG
ATCTCCAGAATCAGAAACTGAAAGAGTTGAATGACTGGCTAACAAAAACAGAAGAAAGAACAAGGAAAATGGAGG
AAGAGCCTCTTGGACCTGATCTTGAAGACCTAAAACGCCAAGTACAACAACATAAGGTGCTTCAAGAAGATCTAG
AACAAGAACAAGTCAGGGTCAATTCTCTCACTCACATGGTGGTGGTAGTTGATGAATCTAGTGGAGATCACGCAA
CTGCTGCTTTGGAAGAACAAGTTTAAGGTATTGGGAGATCGATGGGCAAACATCTGTAGATGGACAGAAGACCGC
TGGGTTCTTTTACAAGACATCCTTCTCAAATGGCAACGTCTTACTGAAGAACAGTGCCTTTTTAGTGCATGGCTT
TCAGAAAAAGAAGATGCAGTGAACAAGATTCACACAACTGGCTTTAAAGATCAAAATGAAATGTTATCAAGTCTT
CAAAAACTGGCCGTTTTAAAAGCGGATCTAGAAAAGAAAAAGCAATCCATGGGCAAACTGTATTCACTCAAACAA
GATCTTCTTTCAACACTGAAGAATAAGTCAGTGACCCAGAAGACGGAAGCATGGCTGGATAACTTTGCCCGGTGT
TGGGATAATTTAGTCCAAAAACTTGAAAAGAGTACAGCACAGGAAACTGAAATAGCAGTTCAAGCTAAACAACCG
GATGTGGAAGAGATTTTGTCTAAAGGGCAGCATTTGTACAAGGAAAAACCAGCCACTCAGCCAGTGAAGAGGAAG
TTAGAAGATCTGAGCTCTGAGTGGAAGGCGGTAAACCGTTTACTTCAAGAGCTGAGGGCAAAGCAGCCTGACCTA
GCTCCTGGACTGACCACTATTGGAGCCTCTCCTACTCAGACTGTTACTCTGGTGACACAACCTGTGGTTAGTAAG
GAAACTGCCATCTCCAAACTAGAAATGCCATCTTCCTTGATGTTGGAGGTACCTGCTCTGGCAGATTTCAACGGG
GCTTGGACAGAACTTACCGAGTGGCTTTCTCTGCTTGATCAAGTTATAAAATCACAGAGGGTGATGGTGGGTGAC
CTTGAGGATATCAACGAGATGATCATCAAGCAGAAGGCAACAATGCAGGATTTGGAACAGAGGCGTCCCCAGTTG
GAAGAACTCATTACCGCTGCCCAAAATTTGAAAAACAAGACCAGCAATCAAGAGGCTAGAACAATCATTACGGAT
CGAATTGAAAGAATTCAGAATCAGTGGGATGAAGTACAAGAACACCTTCAGAACCGGAGGCAACAGTTGAATGAA
ATGTTAAAGGATTCAACACAATGGCTGGAAGCTAAGGAAGAAGCTGAGCAGGTCTTAGGACAGGGCAGAGCCAAG
CTTGAGTCATGGAAGGAGGGTCCCTATACAGTAGATGCAATCCAAAAGAAAATCACAGAAACCAAGCAGTTGGCC
AAAGACCTCCGCCAGTGGCAGACAAATGTAGATGTGGCAAATGACTTGGCCCTGAAACTTCTCCGGGATTATTCT
GCAGATGATACCAGAAAAGTCCACATGATAACAGAGAATATCAATGCCTCTTGGAGAAGCATTCATAAAAGGGTG
AGTGAGCGAGAGGCTGCTTTGGAAGAAACTCATAGATTACTGCAACAGTTCCCCCTGGACCTGGAAAAGTTTCTT
GCCTGGCTTACAGAAGCTGAAACAACTGCCAATGTCCTACAGGATGCTACCCGTAAGGAAAGGCTCCTAGAAGAC
TCCAAGGGAGTAAAAGAGCTGATGAAACAATGGCAAGACCTCCAAGGTGAAATTGAAGCTCACACAGATGTTTAT
CACAACCTGGATGAAAACAGCCAAAAAATCCTGAGATCCCTGGAAGGTTCCGATGATGCAGTCCTGTTACAAAGA
CGTTTGGATAACATGAACTTCAAGTGGAGTGAACTTCGGAAAAAGTCTCTCAACATTAGGTCCCATTTGGAAGCC
AGTTCTGACCAGTGGAAGCGTCTGCACCTTTCTCTGCAGGAACTTCTGGTGTGGCTACAGCTGAAAGATGATGAA
TTAAGCCGGCAGGCACCTATTGGAGGCGACTTTCCAGCAGTTCAGAAGCAGAACGATGTACATAGGGCCTTCAAG
AGGGAATTGAAAACTAAAGAACCTGTAATCATGAGTACTCTTGAGACTGTACGAATATTTCTGACAGAGCAGCCT
TTGGAAGGACTAGAGAAACTCTACCAGGAGCCCAGAGAGCTGCCTCCTGAGGAGAGAGCCCAGAATGTCACTCGG
CTTCTACGAAAGCAGGCTGAGGAGGTCAATACTGAGTGGGAAAAATTGAACCTGCACTCCGCTGACTGGCAGAGA
AAAATAGATGAGACCCTTGAAAGACTCCAGGAACTTCAAGAGGCCACGGATGAGCTGGACCTCAAGCTGCGCCAA
GCTGAGGTGATCAAGGGATCCTGGCAGCCCGTGGGCGATCTCCTCATTGACTCTCTCCAAGATCACCTCGAGAAA
GTCAAGGCACTTCGAGGAGAAATTGCGCCTCTGAAAGAGAACGTGAGCCACGTCAATGACCTTGCTCGCCAGCTT
ACCACTTTGGGCATTCAGCTCTCACCGTATAACCTCAGCACTCTGGAAGACCTGAACACCAGATGGAAGCTTCTG
CAGGTGGCCGTCGAGGACCGAGTCAGGCAGCTGCATGAAGCCCACAGGGACTTTGGTCCAGCATCTCAGCACTTT
CTTTCCACGTCTGTCCAGGGTCGGTGGGAGAGAGCCATCTCGCCAAACAAAGTGCCCTACTATATCAACCACGAG
ACTCAAACAACTTGCTGGGACCATCCCAAAATGACAGAGCTCTACCAGTCTTTAGCTGACCTGAATAATGTCAGA
TTCTCAGCTTATAGGACTGCCATGAAACTCCGAAGACTGCAGAAGGCCCTTTGCTTGGATCTCTTGAGCCTGTCA
GCTGCATGTGATGCCTTGGACCAGCACAACCTCAAGCAAAATGACCAGCCCATGGATATCCTGCAGATTATTAAT
TGTTTGACCACTATTTATGACCGCCTGGAGCAAGAGCACAACAATTTGGTCAACGTCCCTCTCTGCGTGGATATG
TGTCTGAACTGGCTGCTGAATGTTTATGATACGGGACGAACAGGGAGGATCCGTGTCCTGTCTTTTAAAACTGGC
ATCATTTCCCTGTGTAAAGCACATTTGGAAGACAAGTACAGATACCTTTTCAAGCAAGTGGCAAGTTCAACAGGA
TTTTGTGACCAGCGCAGGCTGGGCCTCCTTCTGCATGATTCTATCCAAATTCCAAGACAGTTGGGTGAAGTTGCA
TCCTTTGGGGGCAGTAACATTGAGCCAAGTGTCCGGAGCTGCTTCCAATTTGCTAATAATAAGCCAGAGATCGAA
GCGGCCCTCTTCCTAGACTGGATGAGACTGGAACCCCAGTCCATGGTGTGGCTGCCCGTCCTGCACAGAGTGGCT
GCTGCAGAAACTGCCAAGCATCAGGCCAAATGTAACATCTGCAAAGAGTGTCCAATCATTGGATTCAGGTACAGG
AGTCTAAAGCACTTTAATTATGACATCTGCCAAAGCTGCTTTTTTTCTGGTCGAGTTGCAAAAGGCCATAAAATG
CACTATCCCATGGTGGAATATTGCACTCCGACTACATCAGGAGAAGATGTTCGAGACTTTGCCAAGGTACTAAAA
AACAAATTTCGAACCAAAAGGTATTTTGCGAAGCATCCCCGAATGGGCTACCTGCCAGTGCAGACTGTCTTAGAG
GGGGACAACATGGAAACTCCCGTTACTCTGATCAACTTCTGGCCAGTAGATTCTGCGCCTGCCTCGTCCCCTCAG
CTTTCACACGATGATACTCATTCACGCATTGAACATTATGCTAGCAGGCTAGCAGAAATGGAAAACAGCAATGGA
TCTTATCTAAATGATAGCATCTCTCCTAATGAGAGCATAGATGATGAACATTTGTTAATCCAGCATTACTGCCAA
AGTTTGAACCAGGACTCCCCCCTGAGCCAGCCTCGTAGTCCTGCCCAGATCTTGATTTCCTTAGAGAGTGAGGAA
AGAGGGGAGCTAGAGAGAATCCTAGCAGATCTTGAGGAAGAAAACAGGAATCTGCAAGCAGAATATGACCGTCTA
AAGCAGCAGCACGAACATAAAGGCCTGTCCCCACTGCCGTCCCCTCCTGAAATGATGCCCACCTCTCCCCAGAGT
CCCCGGGATGCTGAGCTCATTGCTGAGGCCAAGCTACTGCGTCAACACAAAGGCCGCCTGGAAGCCAGGATGCAA
ATCCTGGAAGACCACAATAAACAGCTGGAGTCACAGTTACACAGGCTAAGGCAGGTGCTGGAGCAACCCCAGGCA
GAGGCCAAAGTGAATGGCACAACGGTGTCCTCTCCTTCTACCTCTCTACAGAGGTCCGACAGCAGTCAGCCTATG
CTGCTCCGAGTGGTTGGCAGTCAAACTTCGGACTCCATGGGTGAGGAAGATCTTCTCAGTCGTCCCCAGGACACA
AGCACAGGGTTAGAGGAGGTGATGGAGCAACTCAACAACTCCTTTCCCTAGTTCAAGAGGAAGAAATACCCCTGG
AAAGCCAATGAGAGAGGACACAATGTAG
>CPS1_NM_001145134.2 (SEQ ID NO: 19)
AGACCTTTGAGCAACCTTCACCGCACAGAAACCCAGCCGCGCCCTGCAATTCCCACCGCGGAAGGTGCCGACCAA
CCCCCAGGATGGCGGAAGCTCACCAGGCCGTGGCCTTCCAGTTCACGGTGACCCCAGACGGGGTCGACTTCCGGC
TCAGTCGGGAGGCCCTGAAACACGTCTACCTGTCTGGGATCAACTCCTGGAAGAAACGCCTGATCCGCATCAAGA
ATGGCATCCTCAGGGGCGTGTACCCTGGCAGCCCCACCAGCTGGCTGGTCGTCATCATGGCAACAGTGGGTTCCT
CCTTCTGCAACGTGGACATCTCCTTGGGGCTGGTCAGTTGCATCCAGAGATGCCTCCCTCAGGGGTGTGGCCCCT
ACCAGACCCCGCAGACCCGGGCACTTCTCAGCATGGCCATCTTCTCCACGGGCGTCTGGGTGACGGGCATCTTCT
TCTTCCGCCAAACCCTGAAGCTGCTTCTCTGCTACCATGGGTGGATGTTTGAGATGCATGGCAAGACCAGCAACT
TGACCAGGATCTGGGCTTACCTAGAGTCTGTGCGCCCCTTGTTGGATGATGAGGAATATTACCGCATGGAGTTGC
TGGCCAAAGAATTCCAGGACAAGACTGCCCCCAGGCTGCAGAAATACCTGGTGCTCAAGTCATGGTGGGCAAGTA
ACTATGTGAGTGACTGGTGGGAAGAGTACATCTACCTTCGAGGCAGGAGCCCTCTCATGGTGAACAGCAACTATT
ATGTCATGGACCTTGTGCTC
ATCAAGAATACAGACGTGCAGGCAGCCCGCCTGGGAAACATCATCCACGCCATGATCATGTATCGCCGTAAACTG
GACCGTGAAGAAATCAAGCCTGTGATGGCACTGGGCATAGTGCCTATGTGCTCCTACCAGATGGAGAGGATGTTC
AACACCACTCGGATCCCGGGCAAGGACACAGATGTGCTACAGCACCTCTCAGACAGCCGGCACGTGGCTGTCTAC
CACAAGGGACGCTTCTTCAAGCTGTGGCTCTATGAGGGCGCCCGTCTGCTCAAGCCTCAGGATCTGGAGATGCAG
TTCCAGAGGATCCTGGACGACCCCTCCCCACCTCAGCCTGGGGAGGAGAAGCTGGCAGCCCTCACTGCAGGAGGA
AGGGTGGAGTGGGCGCAGGCACGCCAGGCCTTCTTTAGCTCTGGAAAGAATAAGGCTGCCTTGGAGGCCATCGAG
CGTGCCGCTTTCTTCGTGGCCCTGGATGAGGAATCCTACTCCTATGACCCCGAAGATGAGGCCAGCCTCAGCCTC
TATGGCAAGGCCCTGCTACATGGCAACTGCTACAACAGGTGGTTTGACAAATCCTTCACTCTCATTTCCTTCAAG
AATGGCCAGTTGGGTCTCAATGCAGAGCATGCGTGGGCAGATGCTCCCATCATTGGGCACCTCTGGGAGTTTGTC
CTGGGCACAGACAGCTTCCACCTGGGCTACACGGAGACCGGGCACTGCCTGGGCAAACCGAACCCTGCGCTCGCA
CCTCCTACACGGCTGCAGTG
GGACATTCCAAAACAGTGCCAGGCGGTCATCGAGAGTTCCTACCAGGTGGCCAAGGCGTTGGCAGACGACGTGGA
GTTGTACTGCTTCCAGTTCCTGCCCTTTGGCAAAGGCCTCATCAAGAAGTGCCGGACCAGCCCTGATGCCTTTGT
GCAGATCGCGCTGCAGCTGGCTCACTTCCGGGACAGGGGTAAGTTCTGCCTGACCTATGAGGCCTCAATGACCAG
AATGTTCCGGGAGGGACGGACTGAGACTGTGCGTTCCTGTACCAGCGAGTCCACAGCCTTTGTGCAGGCCATGAT
GGAGGGGTCCCACACAAAAGCAGACCTGCGAGATCTCTTCCAGAAGGCTGCTAAGAAGCACCAGAATATGTACCG
CCTGGCCATGACCGGGGCAGGGATCGACAGGCACCTCTTCTGCCTTTACTTGGTCTCCAAGTACCTAGGAGTCAG
CTCTCCTTTCCTTGCTGAGGTGCTCTCGGAACCCTGGCGTCTCTCCACCAGCCAGATCCCCCAATCCCAGATCCG
CATGTTCGACCCAGAGCAGCACCCCAATCACCTGGGCGCTGGAGGTGGCTTTGGCCCTGTAGCAGATGATGGCTA
TGGAGTTTCCTACATGATTGCAGGCGAGAACACGATCTTCTTCCACATCTCCAGCAAGTTCTCAAGCTCAGAGAC
GAACGCCCAGCGCTTTGGAAACCACATCCGCAAAGCCCTGCTGGACATTGCTGATCTTTTCCAAGTTCCCAAGGC
CTACAGCTGAAGCCCTTAGG
TACCTGTGTTTTGTTTGGGAACTCGGAGGCCCTCCCCCTCCCCCAGCTCAGACCACAGAGGTGGCAAGAGAAGGG
CTGAAGCTGGAAGACTGTTCATGAGGGACTTGTGTGACCTGCTTTGAAATGTGTGACTCTGCTGAGTGACGTAGG
CTCTGAGATAGCTGTCCACGCCCACGTGTTTGCTTGGAATAAATACTTGCCTCAGAACCTTCA
>CPS1_NM_001145135.2 (SEQ ID NO: 20)
AGACCTTTGAGCAACCTTCACCGCACAGAAACCCAGCCGCGCCCTGCAATTCCCACCGCGGAAGGTGCCGACCAA
CCCCCAGGATGGCGGAAGCTCACCAGGCCGTGGCCTTCCAGTTCACGGTGACCCCAGACGGGGTCGACTTCCGGC
TCAGTCGGGAGGCCCTGAAACACGTCTACCTGTCTGGGATCAACTCCTGGAAGAAACGCCTGATCCGCATCAAGA
ATGGCATCCTCAGGGGCGTGTACCCTGGCAGCCCCACCAGCTGGCTGGTCGTCATCATGGCAACAGTGGGTTCCT
CCTTCTGCAACGTGGACATCTCCTTGGGGCTGGTCAGTTGCATCCAGAGATGCCTCCCTCAGGGGTGTGGCCCCT
ACCAGACCCCGCAGACCCGGGCACTTCTCAGCATGGCCATCTTCTCCACGGGCGTCTGGGTGACGGGCATCTTCT
TCTTCCGCCAAACCCTGAAGCTGCTTCTCTGCTACCATGGGTGGATGTTTGAGATGCATGGCAAGACCAGCAACT
TGACCAGGATCTGGGCTATGTGTATCCGCCTTCTATCCAGCCGGCACCCTATGCTCTACAGCTTCCAGACATCTC
TGCCCAAGCTTCCTGTGCCCAGGGTGTCAGCCACAATTCAGCGGTACCTAGAGTCTGTGCGCCCCTTGTTGGATG
ATGAGGAATATTACCGCATGGAGTTGCTGGCCAAAGAATTCCAGGACAAGACTGCCCCCAGGCTGCAGAAATACC
TGGTGCTCAAGTCATGGTGG
GCAAGTAACTATGTGAGTGACTGGTGGGAAGAGTACATCTACCTTCGAGGCAGGAGCCCTCTCATGGTGAACAGC
AACTATTATGTCATGGACCTTGTGCTCATCAAGAATACAGACGTGCAGGCAGCCCGCCTGGGAAACATCATCCAC
GCCATGATCATGTATCGCCGTAAACTGGACCGTGAAGAAATCAAGCCTGTGATGGCACTGGGCATAGTGCCTATG
TGCTCCTACCAGATGGAGAGGATGTTCAACACCACTCGGATCCCGGGCAAGGACACAGATGTGCTACAGCACCTC
TCAGACAGCCGGCACGTGGCTGTCTACCACAAGGGACGCTTCTTCAAGCTGTGGCTCTATGAGGGCGCCCGTCTG
CTCAAGCCTCAGGATCTGGAGATGCAGTTCCAGAGGATCCTGGACGACCCCTCCCCACCTCAGCCTGGGGAGGAG
AAGCTGGCAGCCCTCACTGCAGGAGGAAGGGTGGAGTGGGCGCAGGCACGCCAGGCCTTCTTTAGCTCTGGAAAG
AATAAGGCTGCCTTGGAGGCCATCGAGCGTGCCGCTTTCTTCGTGGCCCTGGATGAGGAATCCTACTCCTATGAC
CCCGAAGATGAGGCCAGCCTCAGCCTCTATGGCAAGGCCCTGCTACATGGCAACTGCTACAACAGGTGGTTTGAC
AAATCCTTCACTCTCATTTCCTTCAAGAATGGCCAGTTGGGTCTCAATGCAGAGCATGCGTGGGCAGATGCTCCC
ATCATTGGGCACCTCTGGGA
GTTTGTCCTGGGCACAGACAGCTTCCACCTGGGCTACACGGAGACCGGGCACTGCCTGGGCAAACCGAACCCTGC
GCTCGCACCTCCTACACGGCTGCAGTGGGACATTCCAAAACAGTGCCAGGCGGTCATCGAGAGTTCCTACCAGGT
GGCCAAGGCGTTGGCAGACGACGTGGAGTTGTACTGCTTCCAGTTCCTGCCCTTTGGCAAAGGCCTCATCAAGAA
GTGCCGGACCAGCCCTGATGCCTTTGTGCAGATCGCGCTGCAGCTGGCTCACTTCCGGGACAGGGGTAAGTTCTG
CCTGACCTATGAGGCCTCAATGACCAGAATGTTCCGGGAGGGACGGACTGAGACTGTGCGTTCCTGTACCAGCGA
GTCCACAGCCTTTGTGCAGGCCATGATGGAGGGGTCCCACACAAAAGCAGACCTGCGAGATCTCTTCCAGAAGGC
TGCTAAGAAGCACCAGAATATGTACCGCCTGGCCATGACCGGGGCAGGGATCGACAGGCACCTCTTCTGCCTTTA
CTTGGTCTCCAAGTACCTAGGAGTCAGCTCTCCTTTCCTTGCTGAGGTGCTCTCGGAACCCTGGCGTCTCTCCAC
CAGCCAGATCCCCCAATCCCAGATCCGCATGTTCGACCCAGAGCAGCACCCCAATCACCTGGGCGCTGGAGGTGG
CTTTGGCCCTGTAGCAGATGATGGCTATGGAGTTTCCTACATGATTGCAGGCGAGAACACGATCTTCTTCCACAT
CTCCAGCAAGTTCTCAAGCT
CAGAGACGAACGCCCAGCGCTTTGGAAACCACATCCGCAAAGCCCTGCTGGACATTGCTGATCTTTTCCAAGTTC
CCAAGGCCTACAGCTGAAGCCCTTAGGTACCTGTGTTTTGTTTGGGAACTCGGAGGCCCTCCCCCTCCCCCAGCT
CAGACCACAGAGGTGGCAAGAGAAGGGCTGAAGCTGGAAGACTGTTCATGAGGGACTTGTGTGACCTGCTTTGAA
ATGTGTGACTCTGCTGAGTGACGTAGGCTCTGAGATAGCTGTCCACGCCCACGTGTTTGCTTGGAATAAATACTT
GCCTCAGAACCTTCA
>CPS1_NM_001145137.2 (SEQ ID NO: 21)
GCGGACTGGCTGGGGGCGTCTCGGCGCGGCTGGCGGCGGGGCCGGCCTAAGCGCGCCCGCGCACCCATCTGCCCC
CGTCCTAGGTGCCGACCAACCCCCAGGATGGCGGAAGCTCACCAGGCCGTGGCCTTCCAGTTCACGGTGACCCCA
GACGGGGTCGACTTCCGGCTCAGTCGGGAGGCCCTGAAACACGTCTACCTGTCTGGGATCAACTCCTGGAAGAAA
CGCCTGATCCGCATCAAGAATGGCATCCTCAGGGGCGTGTACCCTGGCAGCCCCACCAGCTGGCTGGTCGTCATC
ATGGCAACAGTGGGTTCCTCCTTCTGCAACGTGGACATCTCCTTGGGGCTGGTCAGTTGCATCCAGAGATGCCTC
CCTCAGGGGTGTGGCCCCTACCAGACCCCGCAGACCCGGGCACTTCTCAGCATGGCCATCTTCTCCACGGGCGTC
TGGGTGACGGGCATCTTCTTCTTCCGCCAAACCCTGAAGCTGCTTCTCTGCTACCATGGGTGGATGTTTGAGATG
CATGGCAAGACCAGCAACTTGACCAGGATCTGGGCTATGTGTATCCGCCTTCTATCCAGCCGGCACCCTATGCTC
TACAGCTTCCAGACATCTCTGCCCAAGCTTCCTGTGCCCAGGGTGTCAGCCACAATTCAGCGGTACCTAGAGTCT
GTGCGCCCCTTGTTGGATGATGAGGAATATTACCGCATGGAGTTGCTGGCCAAAGAATTCCAGGACAAGACTGCC
CCCAGGCTGCAGAAATACCT
GGTGCTCAAGTCATGGTGGGCAAGTAACTATGTGAGTGACTGGTGGGAAGAGTACATCTACCTTCGAGGCAGGAG
CCCTCTCATGGTGAACAGCAACTATTATGTCATGGACCTTGTGCTCATCAAGAATACAGACGTGCAGGCAGCCCG
CCTGGGAAACATCATCCACGCCATGATCATGTATCGCCGTAAACTGGACCGTGAAGAAATCAAGCCTGTGATGGC
ACTGGGCATAGTGCCTATGTGCTCCTACCAGATGGAGAGGATGTTCAACACCACTCGGATCCCGGGCAAGGACAC
AGATGTGCTACAGCACCTCTCAGACAGCCGGCACGTGGCTGTCTACCACAAGGGACGCTTCTTCAAGCTGTGGCT
CTATGAGGGCGCCCGTCTGCTCAAGCCTCAGGATCTGGAGATGCAGTTCCAGAGGATCCTGGACGACCCCTCCCC
ACCTCAGCCTGGGGAGGAGAAGCTGGCAGCCCTCACTGCAGGAGGAAGGGTGGAGTGGGCGCAGGCACGCCAGGC
CTTCTTTAGCTCTGGAAAGAATAAGGCTGCCTTGGAGGCCATCGAGCGTGCCGCTTTCTTCGTGGCCCTGGATGA
GGAATCCTACTCCTATGACCCCGAAGATGAGGCCAGCCTCAGCCTCTATGGCAAGGCCCTGCTACATGGCAACTG
CTACAACAGGTGGTTTGACAAATCCTTCACTCTCATTTCCTTCAAGAATGGCCAGTTGGGTCTCAATGCAGAGCA
TGCGTGGGCAGATGCTCCCA
TCATTGGGCACCTCTGGGAGTTTGTCCTGGGCACAGACAGCTTCCACCTGGGCTACACGGAGACCGGGCACTGCC
TGGGCAAACCGAACCCTGCGCTCGCACCTCCTACACGGCTGCAGTGGGACATTCCAAAACAGTGCCAGGCGGTCA
TCGAGAGTTCCTACCAGGTGGCCAAGGCGTTGGCAGACGACGTGGAGTTGTACTGCTTCCAGTTCCTGCCCTTTG
GCAAAGGCCTCATCAAGAAGTGCCGGACCAGCCCTGATGCCTTTGTGCAGATCGCGCTGCAGCTGGCTCACTTCC
GGGACAGGGGTAAGTTCTGCCTGACCTATGAGGCCTCAATGACCAGAATGTTCCGGGAGGGACGGACTGAGACTG
TGCGTTCCTGTACCAGCGAGTCCACAGCCTTTGTGCAGGCCATGATGGAGGGGTCCCACACAAAAGCAGACCTGC
GAGATCTCTTCCAGAAGGCTGCTAAGAAGCACCAGAATATGTACCGCCTGGCCATGACCGGGGCAGGGATCGACA
GGCACCTCTTCTGCCTTTACTTGGTCTCCAAGTACCTAGGAGTCAGCTCTCCTTTCCTTGCTGAGGTGCTCTCGG
AACCCTGGCGTCTCTCCACCAGCCAGATCCCCCAATCCCAGATCCGCATGTTCGACCCAGAGCAGCACCCCAATC
ACCTGGGCGCTGGAGGTGGCTTTGGCCCTGTAGCAGATGATGGCTATGGAGTTTCCTACATGATTGCAGGCGAGA
ACACGATCTTCTTCCACATC
TCCAGCAAGTTCTCAAGCTCAGAGACGAACGCCCAGCGCTTTGGAAACCACATCCGCAAAGCCCTGCTGGACATT
GCTGATCTTTTCCAAGTTCCCAAGGCCTACAGCTGAAGCCCTTAGGTACCTGTGTTTTGTTTGGGAACTCGGAGG
CCCTCCCCCTCCCCCAGCTCAGACCACAGAGGTGGCAAGAGAAGGGCTGAAGCTGGAAGACTGTTCATGAGGGAC
TTGTGTGACCTGCTTTGAAATGTGTGACTCTGCTGAGTGACGTAGGCTCTGAGATAGCTGTCCACGCCCACGTGT
TTGCTTGGAATAAATACTTGCCTCAGAACCTTCA
>CPS1_NM_004377.4 (SEQ ID NO: 22)
AGAGTGGCTGGCCCCACGCACGGACAGGAGTGAACCCGAGCTGTGCCGACCAACCCCCAGGATGGCGGAAGCTCA
CCAGGCCGTGGCCTTCCAGTTCACGGTGACCCCAGACGGGGTCGACTTCCGGCTCAGTCGGGAGGCCCTGAAACA
CGTCTACCTGTCTGGGATCAACTCCTGGAAGAAACGCCTGATCCGCATCAAGAATGGCATCCTCAGGGGCGTGTA
CCCTGGCAGCCCCACCAGCTGGCTGGTCGTCATCATGGCAACAGTGGGTTCCTCCTTCTGCAACGTGGACATCTC
CTTGGGGCTGGTCAGTTGCATCCAGAGATGCCTCCCTCAGGGGTGTGGCCCCTACCAGACCCCGCAGACCCGGGC
ACTTCTCAGCATGGCCATCTTCTCCACGGGCGTCTGGGTGACGGGCATCTTCTTCTTCCGCCAAACCCTGAAGCT
GCTTCTCTGCTACCATGGGTGGATGTTTGAGATGCATGGCAAGACCAGCAACTTGACCAGGATCTGGGCTATGTG
TATCCGCCTTCTATCCAGCCGGCACCCTATGCTCTACAGCTTCCAGACATCTCTGCCCAAGCTTCCTGTGCCCAG
GGTGTCAGCCACAATTCAGCGGTACCTAGAGTCTGTGCGCCCCTTGTTGGATGATGAGGAATATTACCGCATGGA
GTTGCTGGCCAAAGAATTCCAGGACAAGACTGCCCCCAGGCTGCAGAAATACCTGGTGCTCAAGTCATGGTGGGC
AAGTAACTATGTGAGTGACT
GGTGGGAAGAGTACATCTACCTTCGAGGCAGGAGCCCTCTCATGGTGAACAGCAACTATTATGTCATGGACCTTG
TGCTCATCAAGAATACAGACGTGCAGGCAGCCCGCCTGGGAAACATCATCCACGCCATGATCATGTATCGCCGTA
AACTGGACCGTGAAGAAATCAAGCCTGTGATGGCACTGGGCATAGTGCCTATGTGCTCCTACCAGATGGAGAGGA
TGTTCAACACCACTCGGATCCCGGGCAAGGACACAGATGTGCTACAGCACCTCTCAGACAGCCGGCACGTGGCTG
TCTACCACAAGGGACGCTTCTTCAAGCTGTGGCTCTATGAGGGCGCCCGTCTGCTCAAGCCTCAGGATCTGGAGA
TGCAGTTCCAGAGGATCCTGGACGACCCCTCCCCACCTCAGCCTGGGGAGGAGAAGCTGGCAGCCCTCACTGCAG
GAGGAAGGGTGGAGTGGGCGCAGGCACGCCAGGCCTTCTTTAGCTCTGGAAAGAATAAGGCTGCCTTGGAGGCCA
TCGAGCGTGCCGCTTTCTTCGTGGCCCTGGATGAGGAATCCTACTCCTATGACCCCGAAGATGAGGCCAGCCTCA
GCCTCTATGGCAAGGCCCTGCTACATGGCAACTGCTACAACAGGTGGTTTGACAAATCCTTCACTCTCATTTCCT
TCAAGAATGGCCAGTTGGGTCTCAATGCAGAGCATGCGTGGGCAGATGCTCCCATCATTGGGCACCTCTGGGAGT
TTGTCCTGGGCACAGACAGC
TTCCACCTGGGCTACACGGAGACCGGGCACTGCCTGGGCAAACCGAACCCTGCGCTCGCACCTCCTACACGGCTG
CAGTGGGACATTCCAAAACAGTGCCAGGCGGTCATCGAGAGTTCCTACCAGGTGGCCAAGGCGTTGGCAGACGAC
GTGGAGTTGTACTGCTTCCAGTTCCTGCCCTTTGGCAAAGGCCTCATCAAGAAGTGCCGGACCAGCCCTGATGCC
TTTGTGCAGATCGCGCTGCAGCTGGCTCACTTCCGGGACAGGGGTAAGTTCTGCCTGACCTATGAGGCCTCAATG
ACCAGAATGTTCCGGGAGGGACGGACTGAGACTGTGCGTTCCTGTACCAGCGAGTCCACAGCCTTTGTGCAGGCC
ATGATGGAGGGGTCCCACACAAAAGCAGACCTGCGAGATCTCTTCCAGAAGGCTGCTAAGAAGCACCAGAATATG
TACCGCCTGGCCATGACCGGGGCAGGGATCGACAGGCACCTCTTCTGCCTTTACTTGGTCTCCAAGTACCTAGGA
GTCAGCTCTCCTTTCCTTGCTGAGGTGCTCTCGGAACCCTGGCGTCTCTCCACCAGCCAGATCCCCCAATCCCAG
ATCCGCATGTTCGACCCAGAGCAGCACCCCAATCACCTGGGCGCTGGAGGTGGCTTTGGCCCTGTAGCAGATGAT
GGCTATGGAGTTTCCTACATGATTGCAGGCGAGAACACGATCTTCTTCCACATCTCCAGCAAGTTCTCAAGCTCA
GAGACGAACGCCCAGCGCTT
TGGAAACCACATCCGCAAAGCCCTGCTGGACATTGCTGATCTTTTCCAAGTTCCCAAGGCCTACAGCTGAAGGTT
GGAGAAATGCCAGCTGCCCTTTCGTCCCCACACTGTGGAGGAAGGGACCTGTGGCAGCTCACAGGCATGAGGGGT
GGCCGTGCACAGGTGCCCAGGCTCCAAGGACAGCTCCGGCAGCAGGTCCTCGCTGGGCAGATGCTGCTCCCTGAG
GGCCCAGGTGGTGGAGGTGGGGTTGGAGCAGGAAGGGAATTTTGATTTTTTTTTTTCTTGATAGATACTAATAAA
AATAAGGCTGTGTAATTTTCTCTCAGCCCTTAGGTACCTGTGTTTTGTTTGGGAACTCGGAGGCCCTCCCCCTCC
CCCAGCTCAGACCACAGAGGTGGCAAGAGAAGGGCTGAAGCTGGAAGACTGTTCATGAGGGACTTGTGTGACCTG
CTTTGAAATGTGTGACTCTGCTGAGTGACGTAGGCTCTGAGATAGCTGTCCACGCCCACGTGTTTGCTTGGAATA
AATACTTGCCTCAGAACCTTCA
>CPS1_NM_152245.3 (SEQ ID NO: 23)
AGACCTTTGAGCAACCTTCACCGCACAGAAACCCAGCCGCGCCCTGCAATTCCCACCGCGGAAGGTGCCGACCAA
CCCCCAGGATGGCGGAAGCTCACCAGGCCGTGGCCTTCCAGTTCACGGTGACCCCAGACGGGGTCGACTTCCGGC
TCAGTCGGGAGGCCCTGAAACACGTCTACCTGTCTGGGATCAACTCCTGGAAGAAACGCCTGATCCGCATCAAGA
ATGGCATCCTCAGGGGCGTGTACCCTGGCAGCCCCACCAGCTGGCTGGTCGTCATCATGGCAACAGTGGGTTCCT
CCTTCTGCAACGTGGACATCTCCTTGGGGCTGGTCAGTTGCATCCAGAGATGCCTCCCTCAGGGGTGTGGCCCCT
ACCAGACCCCGCAGACCCGGGCACTTCTCAGCATGGCCATCTTCTCCACGGGCGTCTGGGTGACGGGCATCTTCT
TCTTCCGCCAAACCCTGAAGCTGCTTCTCTGCTACCATGGGTGGATGTTTGAGATGCATGGCAAGACCAGCAACT
TGACCAGGATCTGGGCTATGTGTATCCGCCTTCTATCCAGCCGGCACCCTATGCTCTACAGCTTCCAGACATCTC
TGCCCAAGCTTCCTGTGCCCAGGGTGTCAGCCACAATTCAGCGGTACCTAGAGTCTGTGCGCCCCTTGTTGGATG
ATGAGGAATATTACCGCATGGAGTTGCTGGCCAAAGAATTCCAGGACAAGACTGCCCCCAGGCTGCAGAAATACC
TGGTGCTCAAGTCATGGTGG
GCAAGTAACTATGTGAGTGACTGGTGGGAAGAGTACATCTACCTTCGAGGCAGGAGCCCTCTCATGGTGAACAGC
AACTATTATGTCATGGACCTTGTGCTCATCAAGAATACAGACGTGCAGGCAGCCCGCCTGGGAAACATCATCCAC
GCCATGATCATGTATCGCCGTAAACTGGACCGTGAAGAAATCAAGCCTGTGATGGCACTGGGCATAGTGCCTATG
TGCTCCTACCAGATGGAGAGGATGTTCAACACCACTCGGATCCCGGGCAAGGACACAGATGTGCTACAGCACCTC
TCAGACAGCCGGCACGTGGCTGTCTACCACAAGGGACGCTTCTTCAAGCTGTGGCTCTATGAGGGCGCCCGTCTG
CTCAAGCCTCAGGATCTGGAGATGCAGTTCCAGAGGATCCTGGACGACCCCTCCCCACCTCAGCCTGGGGAGGAG
AAGCTGGCAGCCCTCACTGCAGGAGGAAGGGTGGAGTGGGCGCAGGCACGCCAGGCCTTCTTTAGCTCTGGAAAG
AATAAGGCTGCCTTGGAGGCCATCGAGCGTGCCGCTTTCTTCGTGGCCCTGGATGAGGAATCCTACTCCTATGAC
CCCGAAGATGAGGCCAGCCTCAGCCTCTATGGCAAGGCCCTGCTACATGGCAACTGCTACAACAGGTGGTTTGAC
AAATCCTTCACTCTCATTTCCTTCAAGAATGGCCAGTTGGGTCTCAATGCAGAGCATGCGTGGGCAGATGCTCCC
ATCATTGGGCACCTCTGGGA
GTTTGTCCTGGGCACAGACAGCTTCCACCTGGGCTACACGGAGACCGGGCACTGCCTGGGCAAACCGAACCCTGC
GCTCGCACCTCCTACACGGCTGCAGTGGGACATTCCAAAACAGTGCCAGGCGGTCATCGAGAGTTCCTACCAGGT
GGCCAAGGCGTTGGCAGACGACGTGGAGTTGTACTGCTTCCAGTTCCTGCCCTTTGGCAAAGGCCTCATCAAGAA
GTGCCGGACCAGCCCTGATGCCTTTGTGCAGATCGCGCTGCAGCTGGCTCACTTCCGGGACAGGGGTAAGTTCTG
CCTGACCTATGAGGCCTCAATGACCAGAATGTTCCGGGAGGGACGGACTGAGACTGTGCGTTCCTGTACCAGCGA
GTCCACAGCCTTTGTGCAGGCCATGATGGAGGGGTCCCACACAAAAGCAGACCTGCGAGATCTCTTCCAGAAGGC
TGCTAAGAAGCACCAGAATATGTACCGCCTGGCCATGACCGGGGCAGGGATCGACAGGCACCTCTTCTGCCTTTA
CTTGGTCTCCAAGTACCTAGGAGTCAGCTCTCCTTTCCTTGCTGAGGTGCTCTCGGAACCCTGGCGTCTCTCCAC
CAGCCAGATCCCCCAATCCCAGATCCGCATGTTCGACCCAGAGCAGCACCCCAATCACCTGGGCGCTGGAGGTGG
CTTTGGCCCTGTAGCAGATGATGGCTATGGAGTTTCCTACATGATTGCAGGCGAGAACACGATCTTCTTCCACAT
CTCCAGCAAGTTCTCAAGCT
CAGAGACGAACGCCCAGCGCTTTGGAAACCACATCCGCAAAGCCCTGCTGGACATTGCTGATCTTTTCCAAGTTC
CCAAGGCCTACAGCTGAAGGTTGGAGAAATGCCAGCTGCCCTTTCGTCCCCACACTGTGGAGGAAGGGACCTGTG
GCAGCTCACAGGCATGAGGGGTGGCCGTGCACAGGTGCCCAGGCTCCAAGGACAGCTCCGGCAGCAGGTCCTCGC
TGGGCAGATGCTGCTCCCTGAGGGCCCAGGTGGTGGAGGTGGGGTTGGAGCAGGAAGGGAATTTTGATTTTTTTT
TTTCTTGATAGATACTAATAAAAATAAGGCTGTGTAATTTTCTCTCAGCCCTTAGGTACCTGTGTTTTGTTTGGG
AACTCGGAGGCCCTCCCCCTCCCCCAGCTCAGACCACAGAGGTGGCAAGAGAAGGGCTGAAGCTGGAAGACTGTT
CATGAGGGACTTGTGTGACCTGCTTTGAAATGTGTGACTCTGCTGAGTGACGTAGGCTCTGAGATAGCTGTCCAC
GCCCACGTGTTTGCTTGGAATAAATACTTGCCTCAGAACCTTCA
>CPS1_NM_152246.3 (SEQ ID NO: 24)
AGAGTGGCTGGCCCCACGCACGGACAGGAGTGAACCCGAGCTGTGCCGACCAACCCCCAGGATGGCGGAAGCTCA
CCAGGCCGTGGCCTTCCAGTTCACGGTGACCCCAGACGGGGTCGACTTCCGGCTCAGTCGGGAGGCCCTGAAACA
CGTCTACCTGTCTGGGATCAACTCCTGGAAGAAACGCCTGATCCGCATCAAGAATGGCATCCTCAGGGGCGTGTA
CCCTGGCAGCCCCACCAGCTGGCTGGTCGTCATCATGGCAACAGTGGGTTCCTCCTTCTGCAACGTGGACATCTC
CTTGGGGCTGGTCAGTTGCATCCAGAGATGCCTCCCTCAGGGGTGTGGCCCCTACCAGACCCCGCAGACCCGGGC
ACTTCTCAGCATGGCCATCTTCTCCACGGGCGTCTGGGTGACGGGCATCTTCTTCTTCCGCCAAACCCTGAAGCT
GCTTCTCTGCTACCATGGGTGGATGTTTGAGATGCATGGCAAGACCAGCAACTTGACCAGGATCTGGGCTATGTG
TATCCGCCTTCTATCCAGCCGGCACCCTATGCTCTACAGCTTCCAGACATCTCTGCCCAAGCTTCCTGTGCCCAG
GGTGTCAGCCACAATTCAGCGGTACCTAGAGTCTGTGCGCCCCTTGTTGGATGATGAGGAATATTACCGCATGGA
GTTGCTGGCCAAAGAATTCCAGGACAAGACTGCCCCCAGGCTGCAGAAATACCTGGTGCTCAAGTCATGGTGGGC
AAGTAACTATGTGAGTGACT
GGTGGGAAGAGTACATCTACCTTCGAGGCAGGAGCCCTCTCATGGTGAACAGCAACTATTATGTCATGGACCTTG
TGCTCATCAAGAATACAGACGTGCAGGCAGCCCGCCTGGGAAACATCATCCACGCCATGATCATGTATCGCCGTA
AACTGGACCGTGAAGAAATCAAGCCTGTGATGGCACTGGGCATAGTGCCTATGTGCTCCTACCAGATGGAGAGGA
TGTTCAACACCACTCGGATCCCGGGCAAGGACACAGATGTGCTACAGCACCTCTCAGACAGCCGGCACGTGGCTG
TCTACCACAAGGGACGCTTCTTCAAGCTGTGGCTCTATGAGGGCGCCCGTCTGCTCAAGCCTCAGGATCTGGAGA
TGCAGTTCCAGAGGATCCTGGACGACCCCTCCCCACCTCAGCCTGGGGAGGAGAAGCTGGCAGCCCTCACTGCAG
GAGGAAGGGTGGAGTGGGCGCAGGCACGCCAGGCCTTCTTTAGCTCTGGAAAGAATAAGGCTGCCTTGGAGGCCA
TCGAGCGTGCCGCTTTCTTCGTGGCCCTGGATGAGGAATCCTACTCCTATGACCCCGAAGATGAGGCCAGCCTCA
GCCTCTATGGCAAGGCCCTGCTACATGGCAACTGCTACAACAGGTGGTTTGACAAATCCTTCACTCTCATTTCCT
TCAAGAATGGCCAGTTGGGTCTCAATGCAGAGCATGCGTGGGCAGATGCTCCCATCATTGGGCACCTCTGGGAGT
TTGTCCTGGGCACAGACAGC
TTCCACCTGGGCTACACGGAGACCGGGCACTGCCTGGGCAAACCGAACCCTGCGCTCGCACCTCCTACACGGCTG
CAGTGGGACATTCCAAAACAGTGCCAGGCGGTCATCGAGAGTTCCTACCAGGTGGCCAAGGCGTTGGCAGACGAC
GTGGAGTTGTACTGCTTCCAGTTCCTGCCCTTTGGCAAAGGCCTCATCAAGAAGTGCCGGACCAGCCCTGATGCC
TTTGTGCAGATCGCGCTGCAGCTGGCTCACTTCCGGGACAGGGGTAAGTTCTGCCTGACCTATGAGGCCTCAATG
ACCAGAATGTTCCGGGAGGGACGGACTGAGACTGTGCGTTCCTGTACCAGCGAGTCCACAGCCTTTGTGCAGGCC
ATGATGGAGGGGTCCCACACAAAAGCAGACCTGCGAGATCTCTTCCAGAAGGCTGCTAAGAAGCACCAGAATATG
TACCGCCTGGCCATGACCGGGGCAGGGATCGACAGGCACCTCTTCTGCCTTTACTTGGTCTCCAAGTACCTAGGA
GTCAGCTCTCCTTTCCTTGCTGAGGTGCTCTCGGAACCCTGGCGTCTCTCCACCAGCCAGATCCCCCAATCCCAG
ATCCGCATGTTCGACCCAGAGCAGCACCCCAATCACCTGGGCGCTGGAGGTGGCTTTGGCCCTGTAGCAGATGAT
GGCTATGGAGTTTCCTACATGATTGCAGGCGAGAACACGATCTTCTTCCACATCTCCAGCAAGTTCTCAAGCTCA
GAGACGAACGCCCAGCGCTT
TGGAAACCACATCCGCAAAGCCCTGCTGGACATTGCTGATCTTTTCCAAGTTCCCAAGGCCTACAGCTGAAGCCC
TTAGGTACCTGTGTTTTGTTTGGGAACTCGGAGGCCCTCCCCCTCCCCCAGCTCAGACCACAGAGGTGGCAAGAG
AAGGGCTGAAGCTGGAAGACTGTTCATGAGGGACTTGTGTGACCTGCTTTGAAATGTGTGACTCTGCTGAGTGAC
GTAGGCTCTGAGATAGCTGTCCACGCCCACGTGTTTGCTTGGAATAAATACTTGCCTCAGAACCTTCA
H1 Sequences:
>Aardvark_H1_Bidirectional_Promoter (SEQ ID NO: 25)
GGAACGAAACTAACTTGGCCAAACTATATAAGAATGCCATAGCTTTCAACATTTAATGGTTAGGGTGCCTTCTCA
TAATACACAGCGACATGCAAATATCATGGCCCTTCCAGGAGGCGTGCCTCCCCGTCCCGCGTGTGCGTCTTGCTT
GTGCGCAGGCGCGCTGCTCTTCCGGCTGTAAGACTTTGAGCCCTTGATTTCTGTGAGCGGGTTCGTGAAGTCAGT
GTTCTGGCTCC
>Angolan_colobus_H1_Bidirectional_Promoter (SEQ ID NO: 26)
GGGGAAGGGTGGTCCTCCATAGAACTTATAAGACTCCCATACTCAAAGACATTTCACGTTTATGGTGACTTCCCA
GAAGACATAGCGACATGCAAATATTGCAGGGCGTCACACCCCCTGTCCCTTACAGCTCTCTTCCTGCCAGGGCGC
ACGCGCGCTGGGTGTTCCCGCGTAGTGACACTGGGCCCGCGATTCCTTGGAACGGGTTGATGACGTCAGCGTTCG
AATTAC
>Big_brown_bat_H1_Bidirectional_Promoter (SEQ ID NO: 27)
GGGAAGCGAGCGTCACACGGCGGATATATAAGGCCCCCTTACCTGAAGGCCTTTTACGGTTAGGGTGACTTCCCA
CAACACTTAGCGACATGCAAATTTAGACGGGCGTGCCTCCCCGTCCCTGGGCAACTTCTCTCCTGGACACGCGCG
CTCGCGCTGAGTGTTCCCGCCTTTTGACTCCAGCCGAGCGAATCCTGGGAGAGGGCAGATGACGTCAACAGTCAG
GCTCC
>Black_flying-fox_H1_Bidirectional_Promoter (SEQ ID NO: 28)
GAGAGAAAAAGCCTGCACGCAGAATATATAAGGATCCCATATCTGAAGACATTTTACGGTTACGGTGATTTCCCA
CAACACATAGCGACATGTAAATATAGTGGGGCATGCCTCTCCTGTCCCTGGGCAGCTTCTCGCCAGAACGCACGC
GCGGTGCGTGTTCCCGCCTTGTGACTAAGTTGGCGAGTCAGGGAGGAGATTGATGATGTCATCATCGTCAGCTCA
CCCGCTCC
>Black_snub-nosed_monkey_H1_Bidirectional_Promoter (SEQ ID NO: 29)
GGGGAAGGGTGGTCCTACACAGAGCTTATAAGACTCCCATACTCAAAGACATTTCTCGTTTATGGTGACTTCCCA
GAAGCCATAGCGACATGCAAATATTGCAGGGCGTCACACCCCTGTCCCTTACAGCCATCTTCCTGCCAGGGCGCA
CGCGCGCTGGGTGTTCCCGCGTAGTGACACTGGGCCCGCGATTCCTTGGAGCGGGTTGATGACGTCAGCGTTCGA
CTTCC
>Bonobo_H1_Bidirectional_Promoter (SEQ ID NO: 30)
GGGAAAGGGTGGTGCCACACAGAACTTATAAGACTCCCATATCCAAAGACATTTCACGTTTATGGTGATTTCCCA
GAACACATAGCGACATGCAAATATTGCAGGGCGCCACTCCCCTGTCCCTCACAGCCATCTTCCTGCCAGGGCGCA
CGCGCGCTGGGTGTTCCCGCCTAGTGACACTGGGCCCGCGATTCCTTGGAGCGGGTTGATGACGTCAGCGTTCGA
ATTCC
>Brush-tailed_rat_H1_Bidirectional_Promoter (SEQ ID NO: 31)
GAAGGAAGTTAGTCACAAACGCAAATTATAAGAGGTCCAAAGCTCAGTGTACTCTATGGTTAGGGTGACTTCCCA
CAATACATAGCGATATGCAGATTTCTTCCCCAGTCTGGCCCGCTGGGCCCTCCCTAGAGCGCATGCGCTGCAAGT
CCACGGCGGAGCACCGGGCGGGCGATCCCGGAGCGGGTTGATGACGTCAGCGTTTGAACTCC
>Camel_H1_Bidirectional_Promoter (SEQ ID NO: 32)
GAGAAAGGGTGGGCTCACGCCACCTTTATAAGGCTCCCAAACTTAAAGACATTTCTCGGTTATGGCGACTTCCCA
CAACACATAGCGACATGCAAATACTGCAGACCTGTGGCGCCGACCCGGTCCTGTGCAGCCATCTTTAAGGCTGGG
ACGCACGCGCGCTGCGTGTTCCCGCCCTGTGACTGCGCCGGCGATTACTGGGAGAGGATTGATGACGTCAACGTT
CGGGTTCC
>Cape_golden_mole_H1_Bidirectional_Promoter (SEQ ID NO: 33)
GGGCTAACACTGTGTTGGTATTAGCTTATAAGAAACCCAAATATAAAGTCATTTAACGCTTAGTGTGACTTCCCA
TCATACAAAGCGACATGCAAATATCATGGGCCTTCCGGGAGGCGTGCCTTCCCGTCCTGCGTACTGGAGTTCTCT
CTGGGGCGCACGCGCGCTATGTGTTTCCCGCCTTGTGACTTAGGGCGGGCGATTCCTGAGATCCGAATGGTGACG
TCAACTTTCAGGCTCG
>Chinchilla_H1_Bidirectional_Promoter (SEQ ID NO: 34)
GAAAGCCGAAGGTTTGGAGCGAAACTTATAAGAAGCCCAAATCTCACTATATTTTTAGGTCATGGCGACTTCCCA
CAAGCCACAGCGATATGTAGATATAGGAGCCCCTCCCAGTTCTGGTCCTTCCGCGTCTCACTAAAGCGCATGCGC
TGCAGGTTCGCGGCCTGCGACTGGGCCTGCAATTCCTGGGAGCGAGTTGATGACGTCAGCGTTTGAACTCC
>Chinese_hamster_H1_Bidirectional_Promoter (SEQ ID NO: 35)
ACAGCCTGGTGAATGGCGGGCTTTATAAGGCTCCGGAGAGAAAGCGCTTTCTCAGTTATGGTGGTTTCCCACAAG
GCACAGCGCACACTTTATTTGCATGCGATCTAGCGCAGGCTCCCGCTCCAGACAAGAAGCCCGCGCTTTTCGGCT
GCTTATGATGACGTCGGGCCTCAAGCGCC
>Chinese_tree_shrew_H1_Bidirectional_Promoter (SEQ ID NO: 36)
GGGGGAAGCTGGGTCCACTGAGTTCTTATAAGGTTTCCAGTCCTAGAGCGATTTTACCATTACGGTGATTTCCCA
GCATCCGTAGCTACATGCAAATAGCGCGGGGCGCGTCTCTCAGGTCCCTCCCCCGTGCCCTCTCACTGTACGTAC
CCGCGTCCTAGGGACGCCGCGCCCGGGGTTCCCGGACGTCAGCGTTCCGACGCA
>Consensus-1_H1_Bidirectional_Promoter (SEQ ID NO: 37)
GGGGAAGGGTGGTCCCACACAGAACTTATAAGGCTCCCATACCTAAAGACATTTCACGGTTATGGTGACTTCCCA
CAAGACATAGCGACATGCAAATATTGCAGGGCGTCCCTCCCCTGTCCCTAGGCATCTTCTCGCCAGGGCGCACGC
GCGCTGCGTGTTCCCGCCTTGTGACACTGGGCCCGCGATTCCTGGGAGCGGGTTGATGACGTCAGCGTTCGAGCT
CC
>David's_myotis_H1_Bidirectional_Promoter (SEQ ID NO: 38)
GAGAGGGGCTGTGCACACGGCGGATATATAAGGCCCCCTTATGAATAACCCTTTATAAGTTATGGTGATTTCCCA
CAACGCATAGCGACATGCAAATTCGATGGGCGTGCCTCCTCTGTCCCCAGGCAACTTCTCTCCTGGACGCGCGCT
CCTCGCTGCGTGTTCCCGCCTTTTGACTCCAGCCGAGCGAATCCTGGGAGAGGGCAGGTGACGTCAACAGTCAGG
CTCG
>Drill_H1_Bidirectional_Promoter (SEQ ID NO: 39)
GGGGAAAGGTGGTCCCACACAGAACTTATAAGATTCCCATACTCAAAGACATTTCTCGTTTATGGTGACTTCCCA
GAAGACACAGCGACATGCAAATATTGTAGGGCGTCACACCCCTGTCCCTCACAGTCATCTTCCTGCCAGGGCGCA
CGCGCGCTGGATGTTCCCGCGTAGTGACCCTGGGCCCGCGATTCCTTGGAGCGGGTTGATGACGTCAGCGTTCGA
ATTCC
>Gibbon_H1_Bidirectional_Promoter (SEQ ID NO: 40)
GGGGAAAAGTAGTTTTTTTTAGACCTTATAAGATTCCCAAACCCAAAGACATTTCTCGTTTATGGTGACTTCCCA
GAAGACATAGCGACATGCAAATATTGCAGGGCGCCACTCCCCTGTCCCTCACAGCCATCTTCCTGCCAGGGCGCA
CGCGCGCTGGGTGTTCCCGCCTAGTGACACTCGGCCCGCGATTCCTTGGAGCGGGTTGATGACGTCAGCGTTCGA
ATTCC
>Goat_H1_Bidirectional_Promoter (SEQ ID NO: 41)
GGCAAACAACGCGCGCAAACAGCATTTATAATGAGCTCATACCTAAAGCCACTTTACGATTACGGTGACTTCCCA
CAAGACATTGCGGCATGCAAATATTTTAGTGCGTCCCGCCCCTGGTAGTTCCACGCTAGGACGCACACGCACTAC
GGTTCCCGCCTTTAGACTGCGCTGGCGATTCCAGCGAGCGGACTGATGACGTCAGCGTTGGGGCTCC
>Golden_hamster_H1_Bidirectional_Promoter (SEQ ID NO: 42)
GTGGCCCGGCGGCGGGCGAACTATATAAGCCTCCGCGGAGGAAGCGCTTTCTCGGTTAGGGTGGTTTCCCACAAG
CCTCAGCGCACAGCCTCTTTGCATACGCTCCCGCCGCCCCCGGGCTCCTCCCTCTCCGCACAAGAAGCCCGCGCA
TTTCGACTGCGGATGATGACGTCGGGCCTCGAGCGCC
>Golden_snub-nosed_monkey_H1_Bidirectional_Promoter (SEQ ID NO: 43)
GGGGAAGGGTGGTCCTACACAGAGCTTATAAGACTCCCATACTCAAAGACATTTCTCGTTTATGGTGACTTCCCA
GAAGCCATAGCGACATGCAAATATTGCAGGGCGTCACACCCCTGTCCCTTACAGCCATCTTCCTGCCAGGGCGCA
CGCGCGCTGGGTGTTCCCGCGTAGTGACACTGGGCCCGCGATTCCTTGGAGCGGGTTGATGACGTCAGCGTTCGA
ATTCC
>Hedgehog_H1_Bidirectional_Promoter (SEQ ID NO: 44)
GCCTAAACCGGCTCTTTCAACAGACTTATAAGGACCTCTTATCTTAGGACATTTTTTTCTTAGGGTAACTTCCCA
TGATGCACAGCGATATGTAAATATGGCGCCGCGAGTCTCTCCTAGGCGTCTCCCCAGGACGCAGGCGCACTGCTT
GTTCCCGCGTTAACATTGCTGATTCTGGGAGACTGCTGATGACGTCAGCGTCCAGTCTAC
>Killer_whale_H1_Bidirectional_Promoter (SEQ ID NO: 45)
GCCGAAAACCAGGCTCAAGCCACATTTATAAGGCTCCCAAACCTAAATACATTTGTCGGTTATGGTGACTTCCCG
CAACACATTGCGACATGCAAATACTGCGGAGCGTTCCTCCCCTAGCAACTCCTCGCTGGGACGCACGCGCGCTAC
GTGCTCCCGCCTTTTGACCGAGCCGGCGATACTTGGGAGAGGGTTGATGACGTCAGCGTTCTGGCTCC
>Lesser_Egyptian_jerboa_H1_Bidirectional_Promoter (SEQ ID NO: 46)
GGGCAGACCTTAACCAAGCGGAGGTTTATAAAGCGCCCACATTCAGTGACACTTCTCAGTCACGGTGACTTCCCA
CAAAACACAGCGCATGCAAATATTATGGCGGGAGGGGGGGTGCTCGCCTGGGCGCACGCGCGCTGTGGGTTCCCG
CGAGCGGGATGATGACGTCACTAAGTGAGC
>Manatee_H1_Bidirectional_Promoter (SEQ ID NO: 47)
GAGCCAAACAGCTGTTGGTCACATTATATAAGAATCCCATATATAAAGACATTTTTGGCGTAGGGTGACTTCCCA
CAATACATAGCGACATGCAAATACCATGGTCCTCCAGGAGGCGTGCCTCCCCGTCCCCTTGGTCCGGTTCTTGCT
GGGGCGCACGCGCGCTGCGTGTTCCCGGTCTGTGACTCAGCTCGCGATTCCGGAGAGCGGATTGGTGAAGTCAAT
GTTCTGGGTCC
>Mas_night_monkey_H1_Bidirectional_Promoter (SEQ ID NO: 48)
GGGGAAGGGTGGTCCTATACAGAACTTATAAGACTCCCATACCCAAAGACATTTCACGGTTATGGTGACTTCCCA
GAAGACACAGCGACATGCAAATATTGTAGGTCGTGCCTCGCTTGTCCCTCAGTAGTCTTCCTTTCAGAGCGCACG
CGCGCTGGGTGTCCCGCCAACTGACACTGGGCTCGCGATTCCTTGGAGCGGGTTGATGACGTCAGCGTTCGAATT
CC
>Microbat_H1_Bidirectional_Promoter (SEQ ID NO: 49)
GGAGAAGGAGGCGTAGACGGCGGATATATAAGGCCCCCTTATGTGTAGTCCTTTTACGGTTAGGGTGACTTCCCA
CAACGCATAGCGACATGCAAATTTGACGGGCGTGCCTCCTCTGTCCCCGGGCAACTTCTCTCCTGGACGCGCGCT
CGCGCTGCGTGTTCCCGCCTTTTGACTCCAGCCGAGCGAATCCTGGGAGAGGGCAGGTGACGTCAACAGTCAGGC
TCG
>Opossum_H1_Bidirectional_Promoter (SEQ ID NO: 50)
GGTGCGGGGCCTCAAAGAGAGCGATATATAACGCTCACAAAACCCGTGCTATTTCTTACAGAGGGTGATATCCCC
ATGATCCCCGGCGGTATGCAAATAGTAGTCGCGTCAGAGCAGAGCGCAGTCAGCCGCTCTCTCCTAGCGCGGGAA
ATCTATTTCTTCTTCAGTCTCGGTAACGAGCGCATGCGCATACTGTAGGTGACCTACGGTTTTGTCAGGAATCGG
TTGGGAGCACC
>Pacific_walrus_H1_Bidirectional_Promoter (SEQ ID NO: 51)
GGGAAACGGTGGCCCCAAAGAGCATTTATAAAGCTCCCTCAACTAAATGCATTTATCAGTTATGGTGACTTCCCA
CAATACATCGCAACATGCAAACATCGCGGGGAGTACCTCCCCTGTCCCTACGTGTCTTCTCAGGACGCACGCACG
CGCGCTGTGTTCCCGCCCTGTGACTCTAGGCGGGCAATTCCTAGAAGACGCTTGCTGACGGGAACGTTCCGGCTC
C
>Pig-tailed_macaque_H1_Bidirectional_Promoter (SEQ ID NO: 52)
GGGGAAAGCCGATCCCAGCCAGAACTTATAAGATTCCCATACTCAAAGACATTTCTCGTTTATGGTGACTTCCCA
GAAGACACAGCGACATGCAAATATTGTAGGGCGTCACACCCCTGTCCCTCACAGTCATCTTCCTGCCAGGGCGCA
CGCGCGCTGGGTGTTCCCGCGTAGTGACACTGGGCCCGCGATTCCTTGGAGCGGGTTGATGACGTCAGCGTTCGA
ATTCC
>Prairie_vole_H1_Bidirectional_Promoter (SEQ ID NO: 53)
GGGAAGGCGGGGCGGCGGCACTAAAAGGCTCCGGAGCGGCCCAGACTTTACAGTTATGGTGGCTTCCCACGAGGC
GCAGCGCCACTCATTTGCATGGACCCGCCCCAGACGGGAAGCCCGCACCGCTCATTTGTGTGGCCCCGCCCCAGA
CGGGAAGCCCGCGCCACTCATTTGC
>Rhesus_H1_Bidirectional_Promoter (SEQ ID NO: 54)
GGGGAAGGGTGGTCCCACACAGAACTTATAAGATTCCCATACTCAAAGACCTTTCTCGTTTATGGTGACTTCCCA
GAAGACACAGCGACATGCAAATATTGTAGGGCGTCACACCCCTGTCCCTCACAGTCATCTTCCTGCCAGGGCGCA
CGCGCGCTGGGTGTTCCCGCGTAGTGACACTGGGCCCGCGATTCCTTGGAGCGGGTTGATGACGTCAGCGTTCGA
ATTCC
>Ryukyu_mouse_H1_Bidirectional_Promoter (SEQ ID NO: 55)
TGGAGGGTGGAGACCGGCCGCCACTATAAGGCTCGAAAGAGGAATAAATTTTACGTTTAGGGTGATTTCCCACAA
AGCACAGCGCGTAATTTGCATGTGCTCTATCCCAGGCTCCAGTGCCAGACAAGAAGCCCGCGCATCCGGGCAAGG
GATGATGACGTCGTCCTTCAAGAGCG
>Shrew_H1_Bidirectional_Promoter (SEQ ID NO: 56)
GCGTAAGACGCGCCGCATCGCGTACTTATAAGGATCCCCTGGTCAACGATCTTTTACAGTTAGGGTGACTTCCCA
CAGTACACGGCGGTATTCAAATATGAAGGGCGTGTCTAGTCCGGGTCCTGGCTAGGCGCATGTGCAGTGCTGGTT
CCCGCCACTTCCGACGTCTACGTTTAGACTCC
>Shrew_mouse_H1_Bidirectional_Promoter (SEQ ID NO: 57)
TGAAGGCTGTAGACCGGCCGCCACTATAAGGCTCGAAAGAGGAATAAGTTTTTCGCTTACGGTGACTTCCCACAA
AGCACAGCGCGTAATTTGCATGTACTCTATCCCAGGCTTCCTGTTCCAGACTAGAAGCCCGCGCATCCGGGCAAG
GGACGATGACATCATCCCCATCCCTCCAGCGCG
>Sifaka_H1_Bidirectional_Promoter (SEQ ID NO: 58)
GAGGGAAAAGGGTTCTGCACAGAATTTATAAGGCTCCCAAATCTAAAAACATTTCACCATTATGGTGATTTCCCA
CAACACATAGCGACATGCAAATATCTCAGAGCGTACCTCCCCTGTCCTATACGGGCGTCAACTCGCCATGGCGCA
CGCGCGTTGTGTGTTTCCCGCCTGTGACTCTGGGCCCGCGATTCCTCCCAGCGGGTTGAGTACGTCAGCTCCGGT
GCTTC
>Sooty_mangabey_H1_Bidirectional_Promoter (SEQ ID NO: 59)
GGGGAAAGGTGGTCCCACACCGAACTTATAAGACTCCCATACTCAAAGACATTTCTCGTTTATGGTGACTTCCCA
GAAGACACAGCGACATGCAAATATTGTAGGGCGTCACACCCCTGTCCCTCACAGTCATCTTCCTGCCAGGGCGCA
CGCGCGCTGGGTGTTCCCGCGTAGTGACACTGGGCCCGCGATTCCTTGCAGCGGGTTGGTGACGTCAGCGTTCGA
ATTCC
>Squirrel_monkey_H1_Bidirectional_Promoter (SEQ ID NO: 60)
GGGGAAGGGTGGTCCTTCGCAGAACTTATAAGATTCCCAGTCCCGAGGACATTTCTAGATTATGGTGACTTCCCA
GAATACACAGCGACATGCAAATATTGCAGGTCGTGCCTCGCCTGTCCCTCACTGTCGTCTTCCTGCCAGGGCGCA
CGCGCGCTGGGTGTCCCGCCAACTGACACTGGGCTCGCGATTCCTTGGAGCGGGTTGATGACGTCAGCGTTCGAA
TTCC
>Star-nosed_mole_H1_Bidirectional_Promoter (SEQ ID NO: 61)
GCGCAGAGACAAGCTTAGCTAGAATTTATAAGGCGCCCATACTTGCAGACATATATCGGTTAGGGTGACTTCCCA
CAAGCCATAGCGACATGCAAATAGAGAGGGCGGGCTTCCCCTGAGCTTAGGCGTCTTCTTACGAAGTCGCGAGCG
CGTCGCGCGCCTGTTCCCGCCCGGTCACTATTGGCCTGTCACTATTGTCATTCCGCCCTTCCCGGGCGGAGTCTG
GTGACTTTCGGTTCC
>Synthetic-1_H1_Bidirectional_Promoter (SEQ ID NO: 62)
GCAGCGCAGCCCTCTCGCCGCTTATAAAGTGCCGCCCGCACGGCCCTTCTCGCTCACGGCGACTTCCCATAAAGC
ACAGCGCGTAATTTGCATGCGCTCTACCCCAGGCTCCTGTGCTAGACAAGAAGCCCGCGCATCCGGGCAAGGGAT
GATGACGTCAGATCTCC
>Synthetic-2_H1_Bidirectional_Promoter (SEQ ID NO: 63)
GGGGAAAAGTAGTGCCGCTTATAAAGTGCCGCCCGCACGGCCCTTCTCGCTCACGGCGACTTCCCATAAAGCACA
GCGCGTAATTTGCATGCGCTCTACCCCAGGCTCCTGTGCTAGACAAGAAGCCCGCGCATCCCGGACGTCAGATCT
CC
>Tenrec_H1_Bidirectional_Promoter (SEQ ID NO: 64)
AGGTTAAAGCCGCGTCGCCGCGCGCTTATAAGAATCCGGGAACTAACTACATTTCAAGGTCAGGGTGATTACCCA
CCCTGCATAGCGACATGCAAATAGCACGGAACGTCCAGGAGACGTGCCTCTAGGTCTTGGGGAGGGAGGAGTTCG
GCCCAGCGCGCACGCGCACTACGTGTTCCCGCCCGCTGTCTCGGGGCGGGAGATCCCGGGTAGGTGACGTCAGTC
CTCGGCTTC
>Tibetan_antelope_H1_Bidirectional_Promoter (SEQ ID NO: 65)
GGCAAACGACTCCCGCAAACAGCATTTATAATGCGCTCATACATAAAGCCACTTTTCGGTTACGGTGACTTCCCA
CAAGACATTGCGACATGCAAATATTTTAGTGCATCCCGCCCCTGGTAGCTCCACGCTAGGACGCACACGCACTAC
GGTTCCCGCCTTTAGACTGCCGGGGCGATTCCAGGGAGCGGACTGATGACGTCAGCGTTCGGACTCC
>Tree_Shrew_H1_Bidirectional_Promoter (SEQ ID NO: 66)
GGGGGAAGCTGGGTCCACTGAGTTCTTATAAGGTTTCCAGTCCTAGAGCGATTTTACCATTGCGGTGATTTCCCA
GCATCCGTAGCTACATGCAAATAGCGCGGGGCGCGTCTCTCAGGTCCCTCCCCCGTGCCCTCTCACTGTACGTAC
CCGCGTCCTAGGGACGCCGCGCCCGGGGTTCCCGGACGTCAGCGTTCCGACGCA
>Weddell_seal_H1_Bidirectional_Promoter (SEQ ID NO: 67)
GGGGAAGAGTGGCCCCAGAGAGCATTTATAAGGCTCCCGCACCTAAATGCATTTATCAGTTATGGTGACTTCCCA
CAATACATAGCAACATGCAAATATAGCGGGGAGTACCTCCCCTGTCCCTACGTGTCTTCTCAGGACGCACGCACG
CGGGCTGTGTTCCCGCCCTGTGACTCTAAGCGGGCAATTCCTGGAAGAGGCTTGCTGACGGGGACGTTCAGGCTC
C
>White_rhinoceros_H1_Bidirectional_Promoter (SEQ ID NO: 68)
GGAGCAAACATGCGCCAGGCAGCCTTTATAAGACTCACATATCTAAAGACATTTCACAGTTAGGGTGACTTCCCA
CAGGACACAGCGATATGCAAATATCGTGGAGCGTACCTCCCCAGTCTCCGGGCATCTTCTCGCCTACACGCACGC
GCGCCGCGTGTTCCCGCCCTGTGACGCTAGGTGGGCCTTTCATGGGAGAGGGTTGATGACGTCAACATTCGGACT
CC
>White-faced_sapajou_H1_Bidirectional_Promoter (SEQ ID NO: 69)
GGGGAAGGGGTGGCCTACGCAGAACTTATAAGATTCCCACACCTAAAGACATTTAACGATTATGGTGACTTCCCA
GAATACACAGCGACATGCAAATATTGCAGGTCGTACCTCGCCTGTCCCCCACAGTCGTCTTCCTGCCAGGGCGCA
CGCGCGCTGGGTGTCCCGCCAACTGACAGTGGACTCGCGATTCCTTGGAGCGGGTTGATGACGTCAAAGTTCGAA
TGCC
>Alpaca_H1_Bidirectional_Promoter (SEQ ID NO: 70)
GGGAAAGGGTGGGCTCACGCAGCCTTTATAAGACTCCCAAACTTAAAGACATTTCTCGGTTATGGCGACTTCCCA
CAAGACATAGCGACATGCAAATACTGCAGACCTGTGGCGCCGACCCGGTCCTGTGCAGCCATCTTTACGGCTGGG
ACGCACGCGCGCTGCGTGTTCCCGCCCTGTGACTGCGCCGGCGATTACTGGGAGAGGATTGATGACGTCAACGTT
CGGGTTCC
>Armadillo_H1_Bidirectional_Promoter (SEQ ID NO: 71)
AAAGCGATAGTTTTTTAAACTGGACTTATAAGGCACCCATATCTACGTATATTTCATGGTTAGGGTGATTTCCCA
CAACACATAGCGAAATGCAAATATGTGGAGCGGGCGCTGAGGCGTGGTCGGGCGCAAGCGCGCTGCGACTTCCCG
CCTTTCGGCCCTAGGCCCCAGATTCCTGGGAGCTGGATGATGACGTTGACGTTCGGATACC
>Baboon_H1_Bidirectional_Promoter (SEQ ID NO: 72)
GGGGAAAGGTGGTACCATACAGAACTTATAAGATTCCCATACTCAAAGACATTTCACGATTATGGTGACTTCCCA
GAAGACACAGCGACATGCAAATATTGTAGGGCGTCACACCCCCTGTCCCTCACAGTCATCTTCCTGCCAGGGCGC
ACGCGCGCTGGGTGTTCCCGCGTAGTGACACTGGGCCCGCGATTCCTTGGAGCGGGTTGATGACGTCAGCGTTCG
AATTCC
>Bottlenose_dolphin_H1_Bidirectional_Promoter (SEQ ID NO: 73)
GCCGAAAACCAGGCTCAAGCCACATTTATAAGGCTCCCAAATCTAAGTACATTTGTCGGTTATGGTGACTTCCCG
CACCACATTGCGACATGCAAATACTGCGGAGCGTCCCTCCCCTGGCAACTCCTCGCTGGGACGCACGCGCGCTAC
GTGCTCCCGCCTTTTGACTGCGCCGGCGATACTTGGGAGAGGGTTGATGACGTCAGCGTTCTGGCTCC
>Bushbaby_H1_Bidirectional_Promoter (SEQ ID NO: 74)
GCCTAAAAGGGCGCTTGCACAGAATTTATAAGGTTCCCAAACAGAGACACATTTCATTATTATGGTGACTTCCCA
CAATGCACAGCGCCATGCAAATATGCTAGGACCTGCCTCCCCACACCCGCTACCTTAAGGTCGTCAACTAACCAG
TGCGCGCGCGCACTGCGCGTTTCCCGCCGGTGACTCAATGCCCGCGTTTGGTGGGAGCTAGTTGGTGACCTCAGT
TCTGGAGGCTC
>Cat_H1_Bidirectional_Promoter (SEQ ID NO: 75)
GGGAAAGGGTGGCCCCGCCGAGCATTTATAAGACTCCCATACCTAAAGACATTTCTCAGTTATGGTGATTTCCCA
CAACACACAGCAACATGCAAATATCGAGGGGTGTACCGCCCCTGTCCTTAGACGTCTTCTCTCCAGGACGCACGC
GCGCTGTATTCCCGCCTTGTGACTCTAGGCGGGCGATTCCTGGGAGAGGGTTGATGACGTCCAAGTTCTGGCTTC
>Chimp_H1_Bidirectional_Promoter (SEQ ID NO: 76)
GGGAAAGGGTGGTGCCACACAGAACTTATAAGACTCCCATATGCAAAGACATTTCTCGTTTATGGTGATTTCCCA
GAACACATAGCGACATGCAAATATTGCAGGGCGCCACTCCCCTGTCCCTCACTGCCATCTTCCTGCCAGGGCGCA
CGCGCGCTGGGTGTTCCCGCCTAGTGACACTGGGCCCGCGATTCCTTGGAGCGGGTTGATGACGTCAGCGTTCGA
ATTCC
>Cow_H1_Bidirectional_Promoter (SEQ ID NO: 77)
GGCAAACACCGCACGCAAATAGCACTTATAATGTGCTCATACCTAGAGCCACTTTTCGGTTACGGTGACTTCTCA
AAAAGACAGTGGAACATGCAAATATTACAGTGCGTCCCGCCCCTGGTAGGTCTACGCTAGGACGCACGCGCACTA
CGGTTCCCGCCTATAGACTGCGCTGGCGATTCCTGGGAGCGGACTGATGACGTCAGCGTTCGGGATCC
>Crab-eating_macaque_H1_Bidirectional_Promoter (SEQ ID NO: 78)
GGGGAAGGGTGGTCCCACACAGAACTTATAAGATTCCCATACTCAAAGACATTTCTCGTTTATGGTGACTTCCCA
GAAGACACAGCGACATGCAAATATTGTAGGGCGTCACACCCCTGTCCCTCACAGTCATCTTCCTGCCAGGGCGCA
CGCGCGCTGGGTGTTCCCGCGTAGTGACACTGGGCCCGCGATTCCTTGGAGCGGGTTGATGACGTCAGCGTTCGA
ATTCC
>Dog_H1_Bidirectional_Promoter (SEQ ID NO: 79)
GCAGCGCAGCCCTCTCGCCGCTTATAAAGTGCCGCCCGCACGGCCCTTCTCGCTCACGGCGACTTCCCATAACAC
ACAGCAGCATGCAAATACCGCGGGGAGCCCCGCCCCGCCCCGGCCCCCGCACCGCCTCGGGACGCATGCGCCGGC
TCTCCGTTCCCGCCTTGGGCCGGCGGCGGGCGGGCGGGCGAGCGGGCGGGAGCGGCTCCGGCGAGCGGGCGCC
>Elephant_H1_Bidirectional_Promoter (SEQ ID NO: 80)
GGGATAGGAACAAATTCGTCAGGATTTATAAGACTCTCAGAGCTGTAGACATTTCACAGTTAGGGCGATGTCCCA
CAATACATAGCAACATGCAAATACATGAGCCTTCTAGGAGGCCAGCCTCCCCGTCCGCGTGGTCATCTTCTCGCT
AGGGCGCACGCCCGCTGCGTGTTCCCGCTCTGTGACCAGGCAGGCGATTCCTGAGAACCGCTTGGTGACGTCAGT
GTTCTGGCTCC
>European_Hedgehog_H1_Bidirectional_Promoter (SEQ ID NO: 81)
GCCTAAACCGGCTCTTTCGACAGACTTATAAGGACCTCTTATCTTAGGACATTTTTTTGTTAGGGTAACTTCCCA
CGATGCATAGCGATATGTAAATATGGCGCCGCGAGTCTCTCCTAGGCGTCTCCCCAGGACGCAGGCGCACTGCTT
GTTCCCGCGTTAACATTGCTGATTCTGGGAGACTGCTGATGACGTCAGCGTCCAGTCTAC
>Ferret_H1_Bidirectional_Promoter (SEQ ID NO: 82)
GGGAAAGGGTGGACCCACCGAGCATTTATAAGGCTCCCGCATCTAAAGACATTTTACAGTTATGGTGACTTCCCA
CAACGCGTAGCAACATGCAAATATCGTGGAGAGTACCGCCCCTGTCCCCACGCGTCTTCTCAGCACGCACGCACG
CGCGCTGTGTTCCCGCCCTGTGACTCCAGGCGGGTATTTCCAGGGGCGGGTTTGCTGACAGGAACGTTCAGGCTT
C
>Gorilla_H1_Bidirectional_Promoter (SEQ ID NO: 83)
GGGAAAGGGTGGTCCCACACAGAACTTATAAGACTCCCATATCCAAAGACATTTCACGGTTATGGTGATTTCCCA
GAACACATAGCGACATGTAAATATTGCAGGGCGCCACTCCCCAGTCCCTCACAGCCATCTTCCTGCCAGGGCGCA
CGCGCGCTGGGTGTTCCCGCCTAGTGACACTGGGCCCGCGATTCCTTGGAGCGGGTTGATGACGTCAGCGTTCGA
ATTCC
>Green_monkey_H1_Bidirectional_Promoter (SEQ ID NO: 84)
GGGGAAGGGTGGTCCCTTACAGAACTTATAAGATTCCCAAACTCAAAGACATTTCACGTTTATGGTGACTTCCCA
GAAGACATAGCGACATGCAAATATTGCAGGGCGTCACACCCCTCTCCCTCACAGTCATCTTCCTGCCAGGGCGCA
CGCGCGCTGGGTGTTCTCGCGTAGTGACACTGGGCCCGCGATTCCTTGGAGCGGGTTGATGACGTCAGCGTTCGA
ATTCC
>Guinea_pig_H1_Bidirectional_Promoter (SEQ ID NO: 85)
GAGAAAGAAAGGCTCAAACCTAGCCTTATAAGGCTCCCAAATGTCGGTATATTTTTTGGTTATGGTGACTTCCCA
CAATGCATAGCGATATGTAGATATAGGAGTACCTCCCACTTCTGGTCCGTCAGCTCTTTTCTAGGACGCGCGCGC
TGCAGGTTTCCAGCCTGTGATTGGGCCAGCAATTCCGGGAATGAATTGATGACGTCAGCGTTTGAATTCC
>Horse_H1_Bidirectional_Promoter (SEQ ID NO: 86)
GGGGGAAAACAGCCCATGGCTGCATTTATAAGACTCACAGATCTAAAGCCATTTCACGAATAGGGTGACTTCCCA
CAATACACAGCGACATGCAAACATAGCGGGGCGTGCCTTTCCTGTACCTGGGCATCTCTCCTGGACGCACGCGCG
CCGGGTGTTCCCGCGCTGTGACTCTAGGCAAGCGCTTCCTGGGAGAGAGTTGATGACGGCAGCATTCGGGCTCC
>Human_H1_Bidirectional_Promoter (SEQ ID NO: 87)
GGGAAAAAGTGGTCTCATACAGAACTTATAAGATTCCCAAATCCAAAGACATTTCACGTTTATGGTGATTTCCCA
GAACACATAGCGACATGCAAATATTGCAGGGCGCCACTCCCCTGTCCCTCACAGCCATCTTCCTGCCAGGGCGCA
CGCGCGCTGGGTGTTCCCGCCTAGTGACACTGGGCCCGCGATTCCTTGGAGCGGGTTGATGACGTCAGCGTTCGA
ATTCC
>Kangaroo_Rat_Bidirectional_Promoter (SEQ ID NO: 88)
AGGAAAGACTTCGCTGAGGCAGACTTTATAAGGCTCCCGCGCAGAAAGAAACTTTATAGTTATGGTGATTTCCCA
CAAGCCACTGCGTCATGCAAATAAAGCAGGGTACGGCTTCCATGTACCTTAAGGTTTTTTTCTAGGCCGCGTACG
CTCTGCGTATTCAGCCACGTGACCCTGAGCCAGTGGTTGTTGGGAGCACGTTGTGGACCTCTGCGTTTGGATTCC
>Large_flying_fox_H1_Bidirectional_Promoter (SEQ ID NO: 89)
GCGAGAAAAATTCTTCACGCAGAATATATAAGGATCCCATATCTGAAGACATTTTACGATTACGGCGATTTCCCA
CAACACATAGCGACATGTAAATGTAGTGGGGCATGCCTCCCCTGTCCCTGGGCAGCTTCTCGCCAGAACGCACGC
GCGGTGCGTGTTCCCGCCTTGTGACTAAGTTGGCGAGTCAGGGAGGAGATTGATGATGTCATCATCGTCAGCTCA
CCCGCTCC
>Little_Brown_Bat_H1_Bidirectional_Promoter (SEQ ID NO: 90)
GGGAGAAGGAGGCGTAGAGGATATATAAGGCCCCCTTATGTGTAGTCCTTTTACGGTTAGGGTGACTTCCCACAA
CGCATAGCGACATGCAAATTTGACGGGCGTGCCTCCTCTGTCCCTGCGGGCAACTTCTCTCCTGGACGCGCGCGC
GCTGCGTGTTCCCGCCTTTTGACTCCAGCCGAGCGAATCCTGGGAGAGGGCAGGTGACGTCAACAGTCAGGCTCG
>Marmoset_H1_Bidirectional_Promoter (SEQ ID NO: 91)
GAGGAAAAGTAGTCCCACAGACAACTTATAAGATTCCCATACCCTAAGACATTTCACGATTATGGTGACTTCCCA
GAAGACACAGCGACATGCAAATATTGCAGGTCGTGTTTCGCCTGTCCCTCACAGTCGTCTTCCTGCCAGGGCGCA
CGCGCGCTGGGTTTCCCGCCAACTGACGCTGGGCTCGCGATTCCTTGGAGCGGGTTGATGACGTCAGCGTTTGAA
TTCC
>Mouse_H1-1_Bidirectional_Promoter (SEQ ID NO: 92)
TTCAGGATGTAGACCGGCCGCCACTATAAGGCTCGAAAGAGGAATAAATTTTTCGTTTAGGGTGATTTCCCACAA
AGCACAGCGCGTAATTTGCATGCGCTCTACCCCAGGCTCCTGTGCTAGACAAGAAGCCCGCGCATCCGGGCAAGG
GATGATGACGTCGTCCTTCAAGAGCG
>Mouse_H1-2_Bidirectional_Promoter (SEQ ID NO: 93)
TTCAGGATGTAGACCGGCCGCCACTATAAGGCTCGAAAGAGGAATAAATTTTTCGTTTAGGGTGATTTCCCACAA
AGCACAGCGCGTAATTGCATGCGCTCTACCCCAGGCTCCTGTGCTAGACAAGAAGCCCGCGCATCCGGGCAAGGG
ATGATGACGTCGTCCTTCAAGAGCG
>Northern_Treeshrew_H1_Bidirectional_Promoter (SEQ ID NO: 94)
GGGGGAAGCTGGGTCCACTGAGTTCTTATAAGGTTTCCAGTCCTAGAGCGATTTTACCATTGCGGTGATTTCCCA
GCATCCGTAGCTACATGCAAATAGCGCGGGGCGCGTCTCTCAGGTCCCTCCCCGCCCTCTCACTGTACGTACCCG
CGTCCTAGGGACGCCGCGCCCGGGGTTCCCGGACGTCAGCGTTCCGACGCA
>Orangutan_H1_Bidirectional_Promoter (SEQ ID NO: 95)
GAGAAAGGGTGGTCCCGTCCAGAACTTATAAGATTCCCATACCCAAAGACATTTCACGTTTATGGTGACTTCCCA
GAATGCATAGCGACATGCAAATATTGCAGGGCGTCACTCCCCTGTCCCTCACAGCCATCTTCCTGCCAGGGCGCC
CGCGCGCTGGTGTTCCCGCCTAGTGACACTGGGCCCACGATTCCTTGGAGCGGGTTGATGACGTCAGCGCTCGTA
TTCC
>Panda_H1_Bidirectional_Promoter (SEQ ID NO: 96)
AGGGAAAGCCGCGCCTGGGGCGGATTTATAAGGCTTCCATATCTAAAGGCATTTCACAGTCATGGTGACTTCCCA
CAATACATAGCAACATGCAAATATCGCGGGGAGAACCTCCCCTGTCCCTTGTACGCGGCTTCTAAAGACGCACGC
ACGCGCTCTGTGTTCCCGCCCTGTGACTCTAGGCGGGCAATTCCTGGGACAGTGTTCTGACGGGAACGTTCAGGC
TCC
>Pig_H1_Bidirectional_Promoter (SEQ ID NO: 97)
GGAAAACTGCTTCTGTGAGCACTTATAAAACTCCCATAAGTAGAGAGATTTCATAGTTATGGTGATTTCCCATAA
GACATTGCGACATGCAAATATTGTGGCGCGTTCGTCCCCGTCCGGTGCAGGCAGCTTCGCTCCAGGACGCACGCG
CAATACATGTTCCCGCCTTGAGACTGCGCCGGCAGATTCCTAGGAAGTGGTTGATGACGTCGATGTTAGGGATCC
>Pika_H1_Bidirectional_Promoter (SEQ ID NO: 98)
GGGGGAAGCTGGGCTCGATCAGCCTTTATAAAGCTCCAAAAACTCAAGACATTTTTCCGTTACGGTGGCTTCCCA
CAGTACACAGCGACATGCAAATAGGCGGACCGCTTCCCGCTCCGGCGCAGGCGCGCGGGCGCTGTCTCCCCTGGA
CGCGCGCTCGCGGTTCCCGGGAGCTGGCTGATGACGTTCGGTCTCC
>Rabbit_H1_Bidirectional_Promoter (SEQ ID NO: 99)
GGGGAGAGGTGGATCCGAACAGACTTTATAAAGCTCCGAAAGCCCAAGGCATCTTTCCCTTACGGTAGCTTCCCA
CAAGACATAGCGACATGCAAATTTCAGACGCGCTTCTCGCCACAGCGCAAGCGCGCTGTGTGCTGACGCGGGAAC
GGGCCAGGGCGCGGTTCCCGGGAGCGGGTTGATGACGTTAGATCTCC
>Rat_H1_Bidirectional_Promoter (SEQ ID NO: 100)
AGGAGTGTGAAGACCTGCCGCCATAATAAGACTCCAAAAGACAGTGAATTTAACACTTACGGTGACTTCCCACAA
AGCACAGCGTGTAATTTGCATGCGCTCTAGCCCAGGCTCCAGCTCCGGACCAGAAGCCCGCGCATCCCGGCAAAG
GGTGATGACGTCGTCCTTCAAGCGCT
>Rock_Hyax_Bidirectional_Promoter (SEQ ID NO: 101)
AGGGTAAATCGGCGCTGCTCAGCATTTAAAAGAATCCCAAATGTGTCGCCATTTTACGCTTAGGGTGATATCCCA
CAAGACACAGCGACATGCAAATATCGTGAGTCTCTGTTTCCCTGTCCACGAGGGCGTCCTCTCGCTGGGGCGCAC
GCGCGGTGTGTGTGCCCCCGTTGTGTGTTCCCGCGATTCCAAAGAACTGGTTGATAACGTTAGACTTCCGGCTGC
>Sheep_H1_Bidirectional_Promoter (SEQ ID NO: 102)
GGCGAACAATGCGCGCAAACAGCATTTATAATGAGCTCATACCTAAAGCCACTTTACGGTTACGGTGACTTCCCA
CAAGACATTGCGGCATGCAAATATTTTAGTGCGTCCCGCCCCTGGTAGTTCCACGCTAGGACGCACACGCACTAC
GGTTCCCGCCTTTAGACTGCGCTGGCGATTCCAGGAGCGGACTGATGACGTCAGCGTTGGGGCTCC
>Squirrel_H1_Bidirectional_Promoter (SEQ ID NO: 103)
GAAAGGGACTCCGCACAAGCAGAGTTTATAAGGCTCCCATCTGTACAGCCATTTCTCGGTCATGGTAACTACCCA
CAACACACAGCGATATGCAAATATAGCAGAGCGTGTCTTCCCGCGCGCGCCTGGTCGTCTCGGCGCCGGCGCCGG
AACTGTGACAGAGACCCTGCGATTCCTGGGAGCTGGCTGATGACATCAGTGTCTAACCTCC
>Tarsier_H1_Bidirectional_Promoter (SEQ ID NO: 104)
GCGAGAGGGTGGGTCCACACAGAGCTTATAAGGCTTCACAAGTAAAGATATTTCACGGTGACGGTGACTTCCCAC
AATACACTGCGACATGCAAATATAGCCGGGCGTGCCTCCCCGATCCCGGAAGAGCGACTCCTAGCCAGTGCGCAC
GCGCGCTGCGTGTTCGCGTCCTAGGTCGCTGGGCCCGCGGTTCCTGGGAGCGGGTGGTGACGTCAGCGGCCCAGC
TTC
>Two-Toed_Sloth_H1_Bidirectional_Promoter (SEQ ID NO: 105)
AGAAAAAAATAGTTTATGCTGGATTTATAAGATTCCCAAATCTAAAGCCATTTCACAGTTACGGTGATTCCCCAC
TACACACGGCGATATGCAAATATAGCGGAAGTGTTCCTGAGGCGTGGTAAAGCGCGCGCGCGCTGAGAGTTCCCG
CCCTGTGGTGCTGGGCTGGAGATGCCTGAGAACTGGCTGATGACGGCAACGTTCGGGCTCC
>White_cheeked_gibbon_H1_Bidirectional_Promoter (SEQ ID NO: 106)
GGGGAAAAGTAGTAGACCTTATAAGATTCCCAAACCCAAAGACATTTCTCGTTTATGGTGACTTCCCAGAAGACA
TAGCGACATGCAAATATTGCAGGGCGCCACTCCCCTGTCCCTCACAGCCATCTTCCTGCCAGGGCGCACGCGCGC
TGGGTGTTCCCGCCTAGTGACACTCGGCCCGCGATTCCTTGGAGCGGGTTGATGACGTCAGCGTTCGAATTCC
>GAR1-1_Bidirectional_Promoter_Homo_sapiens (SEQ ID NO: 107)
CCTGCCCCGCCTCTGGGAGAGAAGGCGGATCCCTAACGCCAGCTATCTCCAAGAGCAACATTGCCGCAGCACTTC
CGGGACGTCGTGCTGCAAAGGACGCCGCTGTTATACGTCACTTCCACGGCTCAGCGTCAG
>GAR1-2_Bidirectional_Promoter_Homo_sapiens (SEQ ID NO: 108)
CCTGCCCCGCCTCTGGGAGAGAAGGCGGATCCCTAACGCCAGCTATCTCCAAGAGCAACATTGCCGCAGCACTTC
CGGGACGTCGTGCTGCAAAGGACGCCGCTGTTATACGTCACTTCCACGGCTCAGCGTCAGGCAAGTTGGCCTCTC
TGTTGTAAATTAGTGGTTAAGGTTATCTATTATTGCCACTTTTCCAGCGCTAAAGGCTGTTTTGGAACCAGTGTT
GCTTGTTCCGCGGGTGATTGGCTTTTTTTTTTGGCAAACCAGTTATTCAAGTTTCTGGTCTTTAAAAAACTCTGT
GGCGGTACGGTAACCGAGGAGGTTCCAGCGCGGCGGAAGTACCCCGCGGGTGGGTGTGTGCGCAAGGCCAGGGCC
AGAGGGGCACGTGGCGCCG
>macaca_mulatta/1-143_Gar-1 (SEQ ID NO: 109)
CCCACCCCGCCTCTGGAAGAGAAGGCGGATCCCTAACGCCAGCTATCTCCAAGAGCAACATTGCCGCAGCACTTC
CGGGACGTCGTGCTGCGAAGGACGCAGCTATTATACGTCACTTCCACGGCGCGGCGTTAG
>ancestral_sequences9/1-143_Gar-1 (SEQ ID NO: 110)
CCTACCCCGCCTCTGGAAGAGAAGGCGGATCCCTAACGCCAGCTATCTCCAAGAGCAACATTGCCGCAGCACTTC
CGGGACGTCGTGCTGCGAAGGACGCAGCTATTATACGTCACTTCCACGGCGCGGCGTTAG
>papio_anubis/1-143_Gar-1 (SEQ ID NO: 111)
CCTACCCAGCCTCCGGAAGAGAAGGCGGATCCCTAACGCCAGCTATCTCCAAGAGCAACATTGCCGCACCACTTC
CGGGACGTCGTGCTGCGAAGGACGCAGTTATTATACGTCACTTCCACGGCGCGGCGTTAG
>ancestral_sequences10/1-143_Gar-1 (SEQ ID NO: 112)
CCTACCCAGCCTCCGGAAGAGAAGGCGGATCCCTAACGCCAGCTATCTCCAAGAGCAACATTGCCGCACCACTTC
CGGGACGTCGTGCTGCGAAGGACGCAGCTATTATACGTCACTTCCACGGCGCGGCGTTAG
>ancestral_sequences11/1-143_Gar-1 (SEQ ID NO: 113)
CCTGCCCCGCCTCTGGGAGAGAAGGCGGATCCCTAACGCCAGCTATCTCCAAGAGCAACATTGCCGCAGCACTTC
CGGGACGTCGTGCTGGGACGCCGCTATTATACGTCACTTCCACGGCTCCGCGTTAG
>callithrix_jacchus/1-143_Gar-1 (SEQ ID NO: 114)
CCCGCCCCGCCCCCGGTAGAGAGGGCGGATCTCTAACGCCAACTATCTCCAAGAGCAACATTGCCGCAGCACTTC
CGGGATGTCGTGCTGCGAAGGACGCCGCTATTGTACGTCACTTCCGCTTCTCCACTCTAG
>pan_paniscus/1-191_Gar-1 (SEQ ID NO: 115)
CCTGCCCCGCCTCTGGGAGAGAAGGCGGATCCCTAACGCCAGCTATCTCCAAGAGCAACATTGCCGCAGCACTTC
CGGGACGTCGTGCTGCAAAGGACGCCGCTGTTATACGTCACTTCCACAGCTCAGCGTCAG
>pan_troglodytes/1-191_Gar-1 (SEQ ID NO: 116)
CCTGCCCCGCCTCTGGGAGAGAAGGCGGATCCCTAACGCCAGCTATCTCCAAGAGCAACATTGCCGCAGCACTTC
CGGGACGTCGTGCTGCAAAGGACGCCGCTGTTATACGTCACTTCCACGGCTCCGCGTCAG
>pongo_abelii/1-191_Gar-1 (SEQ ID NO: 117)
CCTGCCCCGCCTCTGGGAGAGAAGGCGGATCCCTAACGCCAGCTATCTCCAAGAGCAACGTTGCCACAGCACTTC
CGGGACGTCGTGCTGCAAAAGACGCCGCTGTTATACGTCACTTCCACGGCTCAGCGTTAG
>nomascus_leucogenys/1-191_Gar-1 (SEQ ID NO: 118)
CCTGCCCCGCCTCTGGGAGAGAAGGCGGATCCCTAACTCCAGCTATCTCCAAGAGCAACATTGCCGCAGCACTTC
CGGGACGTAGTGCTGCAAAGGACGCCGCTGTTATACGTCACTTCCACGTCTCAGCGTTAG
>chlorocebus_sabaeus/1-191_Gar-1 (SEQ ID NO: 119)
CCTACCCCACCTCTGGAAGGGAAGGCGGATCCCTAACGCCAGCTATCTCCAAGAGCAACATTGCCGCAGCACTTC
CGGGACGTCGTGCTGGGACGCAGCTATTATACGTCACTTCCACGGCGCCGCGTTAG
>macaca_nemestrina/1-143_Gar-1 (SEQ ID NO: 110)
CCCACCCCGCCTCTGGAAGAGAAGGCGGATCCCTAACGCCAGCTATCTCCAAGAGCAACATTGCCGCAGCACTTC
CGGGACGTCGTGCTGCGAAGGACGCAGATATTATACGTCACTTCCACGGCGCGGCGTTAG
>colobus_angolensis_palliatus/1-143_Gar-1 (SEQ ID NO: 111)
CCTGCCCCGCCTCTGGGAGAGAAGGCGGATCCCTAACGCCAGCTATCTCCAAGAGCGACATTGCCTCAGCACTTC
CGGGACGTCGTACTGCAAAGGACGCAGTTATTATACGTCACTTCCACGGCGCCGCGTTAG
>piliocolobus_tephrosceles/1-143_Gar-1 (SEQ ID NO: 112)
CCTGCTCCGCCTCTGGGAGAGAAGGCGGATCCTTAACGCCAGCTATCTCCTAGAGCAACATTGCCTCAGCACTTC
CGGGACGTCGAGCTGCAAAGGACGCAGTTATTATACGTCACTTCCAGGGCGCCGCGTTAG
>rhinopithecus_bieti/1-143_Gar-1 (SEQ ID NO: 113)
CCTGCCCCGCCTCTGGGAGAGAAGGCGGATCCCTAACGCCAGCTATCTCCAAGAGCGACATTGCCTCAGCACTTC
CGGGACGTAGTGCTGCAAAGGACGCAGTTATTATACGTCACTTCCACGGCGCCGCGTTAG
>aotus_nancymaae/1-143_Gar-1 (SEQ ID NO: 114)
CCCGCCCCGCCCCTGGGACAGAGGGCGGATCTCTAACGCCAACTATCTCCAAGAGCAACATTGCCGCAGCACTTC
CGGGACGTCGTGCTGCAAAGGACGCCGCTATTATACGTCACTTCCGCGGCTCCAG
>cebus_capucinus/1-143_Gar-1 (SEQ ID NO: 115)
CCCGCCCCGCCCCTGGGAGAGAGGGCGGATCTCTAACGCCAACTGTCTCCAAGAGCAACATTGCCGCAGCACTTC
CGGGACGTCGTCCTGCAAAGGACGCCGCTATTATACGTCACTTCTGCTGCTCACTGTAG
>saimiri_boliviensis_boliviensis/1-143_Gar-1 (SEQ ID NO: 116)
CCCGCCCCGCCCCTGGGAGAGAGGGCGGATCTCTAACGCCAACTATCTCCAAGAGCAACATTTCAGCAGCACTTC
CAGGACGTCGCCCTGCAAAGGACGCCGCTATTATACGTCACTTCCGCTGCTCCACTCTGG
>carlito_syrichta/1-143_Gar-1 (SEQ ID NO: 117)
CCTGCCCCGCCTCTAGAGAAGGGGACGGATTCGTAATGCCCGGCAATCGCGCAGCCGCATTTCCGGGACGTCACG
AGGAAAGGGCGCCGAATTGTATGTCATTTCCGCTTTTCATGGCTGG
>otolemur_garnettii/1-143_Gar-1 (SEQ ID NO: 118)
CTCGGCCAGTCTCAGGCAGAAAGGGCGGAAACCGGACCCCAGCGCAATGTCACGGCAGCACTTCCGGTATGCTCC
GTTGCAAAAGACGCTGCTATTGTACGTCACTTCCGCCACCCGGCTGG
>prolemur_simus/1-143_Gar-1 (SEQ ID NO: 119)
CCCGCCCCGCCTCTCGGAGACGGGGCGCGTCCCTCCCGCCGCCGTCTCCCGGGGCAACATGGCGGCAGCACTTCC
GGGGCGCCGGTGGCGAAAGGCGCCGCTATTATACGTCACTTCCGCCGCCCGGCGCGAG
>propithecus_coquereli/1-143_Gar-1 (SEQ ID NO: 120)
CTGGCCCAGCCTCTTATGGCGGGGGCGGACCCCTTACGCCAGCTATCGCCCAGGGCAATATGGCGACATCACTTC
CGGTATGTCAGGTTGTGAAAGGCGCCGCTATTGTACGTCACTTCCGCTGCCCAGCGCGGG
>castor_canadensis/1-143_Gar-1 (SEQ ID NO: 121)
CACAACTCGCCTCTGAGAGAGGAGGCGGATCCCTAACGCCTGCTATCTCCAAGGGCAACACTGCGGCATACTTCC
GGAACGTCAGCTCGATGGGACGCGGTTATTTTACGTCACGTCCGCTACTCTCACTCGG
>calJac3_Gar-1 (SEQ ID NO: 122)
CCCGCCCCGCCCCCGGTAGAGAGGGCGGATCTCTAACGCCAACTATCTCCAAGAGCAACATTGCCGCAGCACTTC
CGGGATGTCGTGCTGCGAAGGACGCCGCTATTGTACGTCACTTCCGCTGCTCCACTCTAG
>otoGar3_Gar-1 (SEQ ID NO: 123)
CTCGGCGTCAGTCTCAGGCAGAAAGGGCGGAAACCGGACCCCAGCGCAATGTCACGGCAGCACTTCCGGTTATGC
TCCGTTGCAAAAGACGCTGCTATTGTACGTCACTTCCGCCACCCGGCTGG
>speTri2_Gar-1 (SEQ ID NO: 124)
ACGCCCGACGGGAGAGGAGGCGGGTCCCTAACTCCGCTATCTCCTAGGGCAACTCGACGGCAATACTTCCGGTAA
CGTCCTGACGTAATGGATGCCGTTTCGCTTTACTTCCGCTTTCTCTTG
>micOch1_Gar-1 (SEQ ID NO: 125)
ACGCCCCGCTGTCTCCAAGGGCAACGAGAGACCTCACTTCCTGAAACGTCTCGTACAGAGGGCGCTGCTATTCTA
TGTCACTTCCGCTCCCCGGG
>criGril_Gar-1 (SEQ ID NO: 126)
AAGCCTCACTATAGGACGGAAGGATCCAGACTCCCGCTGTCTCCAAGGGCAACGCGCTACCACACTTCCGGAAAC
GTCGCGTACGGAGGGCACTGCTATTTTGCGTCACTTCCGCTACCCCGGC
>mesAurl_Gar-1 (SEQ ID NO: 127)
ACGCCTCACTCTAGAACGGAAGACTCCAGACGCCCGCCGTCTCCAAGGGCAACGCGCGACCACACTTCCGGAAAC
GGCGCGTACGGAGGGCGCTTCTATTTTGCGTCACTTCCTCTCCTCCAGG
>mm10_Gar-1 (SEQ ID NO: 128)
ACGCCTCACTGTAGCACGGAAGGACTCAAACAACTCCGTTTCCAAGGGCAACGCGCCGCCACACTTCCGGAAACG
TCGCGTACGGAGGGCGCTGCGATTTTGCGTCACTTCCGCCACCTCTAG
>microcebus_murinus/1-191_Gar-1 (SEQ ID NO: 129)
GCGGCGCCAGCCTCTGGGAGAGGGGGCGGACCCTTACGCCAGCTGTCTCCAAGGGCAATATAGCGGCAGCACTTC
CGGTAGCGACAGGTTGTGAAAGACGCCGCTGTTGTACGTCACTTCCGCTGCCCAGAGCGAG
>cavia_porcellus/1-191_Gar-1 (SEQ ID NO: 130)
CGAGTTGCTTCGGGCCTACTAACATCATGCGGCGTTTCTGGAAGAGGAGCCCGCTTCCGGACGCCCGCCGTCTCC
AGGGGCAACACTTCCGTGAACGTCATGTGTAAGGGACGGGTTACGTCACTTCCTGTGCTCCTTGGCT
>marmota_marmota_marmota/1-191_Gar-1 (SEQ ID NO: 131)
CGCCCGACTTCTGGCAAGAGGAGGCGGGTCCCTAACTCCGCTATCTCCTAGGGCAACACGACGGCAATACTTCCG
GTAACGTCCTGACGTAATGGTTGCCGTTTCGCTTTACTTCCGCTTTCTCTTGCTAA
>sciurus_vulgaris/1-191_Gar-1 (SEQ ID NO: 132)
CGCCCAGCCTCCGGGAAGAGGAAGCAGCTCCCGAATACCGGCTATCTCCAAGGGCAACACCACTGCAATGCTTCC
GGAAACGTCATGGCGTAATGGACGCCGTTACAACTTCACTTCCGCTTCTCTCGCTAC
>mus_caroli/1-191_Gar-1 (SEQ ID NO: 133)
CACGCCTCAACAGCTGTTAGCACGGAAGGACCCAAACAACCCCGTCTCCAAGGGCAATGCGCCGCCACACTTCCG
GAAACGTCGCGTACGGAGGGCGCTGCGATTTTGCGTCACTTCCGCCACCTCTAGCG
>mus_musculus/1-191_Gar-1 (SEQ ID NO: 134)
CACGCCTCACCAGCTGTTAGCACGGAAGGACTCAAACAACTCCGTTTCCAAGGGCAACGCGCCGCCACACTTCCG
GAAACGTCGCGTACGGAGGGCGCTGCGATTTTGCGTCACTTCCGCCACCTCTAGCG
>mus_spretus/1-191_Gar-1 (SEQ ID NO: 135)
CACGCCTCACCAGCTGTTAGCACGGAAGGACTCAAACAACTCCGTCTCCAAGGGCAACGCGCCGCCACACTTCCG
GAAACGTCGCGTACGGAGGGCGCTGCGATTTTGCGTCACTTCCGCCACCTCTAGCG
>mus_pahari/1-191_Gar-1 (SEQ ID NO: 136)
CCCAAACAACCCCGTCTCCAAGGGCAACGCGTCGCCACACTTCCGGAAACGTCGCGTACGGAGGGCGCTGCGATT
TCGCGTCACTTCCGCCACCTCTAGCG
>oryctolagus_cuniculus/1-191_Gar-1 (SEQ ID NO: 137)
CAACCGTAAACCCCAGCAGAAAGAACAGGCGGAGCCCTAACACCAACCTTCTCCCGGAGACACGCCCCCTGCTGC
ACTTCCGGAATGTTCTGGGGCAAAGGGCGCCGCTATTATACGTCACTTCCGCCGCGGTTCTTTCG
>balaenoptera_musculus/1-191_Gar-1 (SEQ ID NO: 138)
CAGCCGAGCCGCTGGGAGAGGGGCGGTCCCTGACGCCAGCCATCGCCAAGGGCAACGCCGCGGGGCGGCACTTCC
TGCAACGTCACGCTGCCAAGGACGCCGCTATTGTACGTCACTTCCTCCGCTCTCCGTAG
>delphinapterus_leucas/1-191_Gar-1 (SEQ ID NO: 139)
CAAGCCGATCCGCTGGGAGAGGGGCGGTCCCTGACGCCAGCCATCGCCAAGGGCAACGCCGCGGGGAGGCACTTC
CTGCAACGTCACGCTGCAAAGGACGCCGCTATTGTACGTCACTTCCTCCACTTCCCGGAG
>monodon_monoceros/1-191_Gar-1 (SEQ ID NO: 140)
CAAGCCGATCCGCTGGGAGAGGGGCGGTCCCTGACGCCAGCCATCGCCAGGGGCAACGCCGCGGGGCGGCACTTC
CTGCAACGTCACGCTGCAAAGGACGCCGCTATTGTACGTCACTTCCTCCACTTCCCGGAA
>phocoena_sinus/1-191_Gar-1 (SEQ ID NO: 141)
CAAGCCGATCCGCTGGGAGAGGCGCGGTCCCTGACGCCAGCCATCGCCAAGGGCAACGCCGCGGGGCGGCACTTC
CTGCAACGTCACGCTGCAAAGGACGCCGCTATTGTACGTCACTTCCTCCGCTCTCCGTAG
>physeter_catodon/1-191_Gar-1 (SEQ ID NO: 142)
CAAACCGAGCCGCTACTAGAGGGGCGGTCCCTCACGCCAGCCATCGCCAAGGGCAACGCCGCGGGGCGGCACTTC
CTGCAACGTCACGGCGCAAAGGACGCCGCTATTGTACGTCACTTCCTCCGCTCTCCGTAG
>bos_grunniens/1-191_Gar-1 (SEQ ID NO: 143)
CTTGCTGGGCCGCGGGGAGAGGGGCGGACCCTGACGCCAGTCATCGCCAAGGGCAACGCCGCAGAGCGGAACTTC
CTGCAACGTCATGCTTCCAAGGACGCCGATATTGTGTGTCACTTCCTCTGCTCGCCGTAG
>capra_hircus/1-191_Gar-1 (SEQ ID NO: 144)
CTTGCCCGGCCGCGGGGAGAGGGGCGGGCCCTGACGCCAGTTATCTCCAAGGGCAACGCCGCAGAGCGGAACTTC
CTGCAACGTCATGCTTCAAAGGACGCTGATATTGTATGTCACTTCCTCTGCTCGCCGTAG
>ovis_aries/1-191_Gar-1 (SEQ ID NO: 145)
CTTCCCGGGCCGCGGGGAGAGGGGCGGGCCCTGACGCCAGTTATCTCCAAGGGCAACGCCGCAGAGCGGAACTTC
CTGCAACGTCATGCTTCAAAGGACGCTGATATTGTATGTCACTTCCTCTGCTGGCAGTAG
>ovis_aries_rambouillet/1-191_Gar-1 (SEQ ID NO: 146)
CTTGCCGGGCCGCGGGGAGAGGGGCGGGCCCTGACGCCAGTTATCTCCAAGGGCAACGCCGCAGAGCGGAACTTC
CTGCAACGTCATGCTTCAAAGGACGCTGATATTGTATGTCACTTCCTCTGCTGGCAGTAG
>cervus_hanglu_yarkandensis/1-191_Gar-1 (SEQ ID NO: 147)
CTGGCCGGGCGGCGGGCAGAGGGGCGGGCCCTGACGCCAGTCGTCGCCAAGGGCAACGCCGCAGAGCGGAACTTC
CTGCAACGTCATGCTTCAGAGGACGCCGATATTGTATGTCACTTCCTCTGCTCGCCATAG
>catagonus_wagneri/1-191_Gar-1 (SEQ ID NO: 148)
CCCGCCTGGCCACTGGGAGAGGGGCAGTCCCTGACGCCAGTCATCGCCAAAGGGCAACCCCGCGGGGTTCCTGCA
AGCAACGTCATGCCGCAAAGGACGCCGCTATTTTACGTCACTTCCTCTGCTCCCGTTAG
>sus_scrofa/1-191_Gar-1 (SEQ ID NO: 149)
CCCGCCTCGCCACTGGGAGAGGGGCGGTGCCTGATGCCAACCATCGCCAAGGGCAACCTCGCGGGGCAGAAGTTC
CGGCGAGTAACGTCATGCCGCAAAGGACGCCGCTATTTTACGTCACTTCCTCTGCTCCCATTAG
>camelus_dromedarius/1-191_Gar-1 (SEQ ID NO: 150)
CCCGCCGGGCTGCTGGGAGAGAGGCGGTCCCTGACGCCAGCCATCTCCAAGGGCAACCCCGCGGCGGCACTTCCT
GCAGCGCCCTAAGGTAAAAGACGCCGCTATTGTACGTCACTTCCTTTGCTCGCGGTAG
>equus_caballus/1-191_Gar-1 (SEQ ID NO: 151)
AACCCGGGCGCCGGGAGAGGGCGGACCCCTGACGCCGCCGTCACCAGGGCAACCCTGCGGGCACTTCCTGCAACG
TCGCGGCAAAGGACGCCGCTATTACACGTCACTTCCTCTGCTCGTCGGTAG
>canis_lupus_dingo/1191_Gar1 (SEQ ID NO: 152)
CCGCCAGGTCCCCGGGAGAGGGGGGCGGAACTCTCACGCCAACCATCTCCCGGGGCAACAGCGCGGCCGCACTTC
CGGGAACTTCTCGACTCAACGGACGCCACTATTATACGTCATTTCCTCCGCTCCTCGTAG
>canis_lupus_familiaris/1-191_Gar-1 (SEQ ID NO: 153)
CCGCCAGGTCCCCGGGAGAGGGGGGCGGAACTCTCACGCCAACCATCTCCCGGGGCAACAGCGCGGCCGCACTTC
CGGCAACTTCTCGAGTCAACGGACGCCACTATTATACGTCATTTCCTCCGCTCCTCGTAG
>rn6 Gar-1 (SEQ ID NO: 154)
AGGCCTGACGATAGAGCCGAAGAACCCAAACCACCCCTGTCTCCAAGGGCAACGCGGCACCACACTTCCGGAAGC
GTCGAGTACGGAAGGCGCTGCTATTTTGCATCATTTCCGCCACCCCTAG
>hetGla2 Gar-1 (SEQ ID NO: 155)
CACGCCCCACTCCGGGAGAGGAGCCGGGTCTCAGACGCCTGCGGTCTCCAGGGGCAACACCGCACAACGCTTCCG
TAAACGTCATGTGCAAGGGACGTCGTTACGTCACTTCAGCGCGCCTTCCTGG
>cavPor3 Gar-1 (SEQ ID NO: 156)
CATGCGGCGTTTCGGAAGAGGAGCCCGCTTCCGGACGCCCGCCGTCTCCAGGGGCAACACTTCCGTGAACGTCAT
GTGTAAGGGACGGGTTACGTCACTTCCTGTGCTCCTTGG
>chiLan1 Gar-1 (SEQ ID NO: 157)
CATGCCCAATTCTGGAAGAGGAATCGCGTCCCTGACGCCTGTTATCTCCAGGGGCAACACTACGGCAATACTTCC
GTAAACGTCATATGTAAGGGACGCTAAACGTCACTTCCTGTACTCCTTGG
>octDeg1 Gar-1 (SEQ ID NO: 158)
CGTGCCTAACTCCGGAATTGGACCCGCGTTCCGGACACCGCTGTTTCCTGGGGCAACACTTCCGTAAACGTCATA
AGCAAGGGACGGCGACGTCACTTCCTGTGTTCCGCGG
>ochPri3 Gar-1 (SEQ ID NO: 159)
AAGGGCGAGCCCCGGGCTGACGGGCGGATCCCCAATGCCCTCCATCTCCCGGAGCAACTCGGCACTTCCGCAAAG
TTCCGCGGCCAAGGACGCCGCTTTTGTGCGTCACTTCCGCCGCTGGACGCGGG
>susScr3 Gar-1 (SEQ ID NO: 160)
CCCGCCTCGCCACTGGGAGAGGGGCGGTGCCTGATGCCAACCATCGCCAAGGGCAACCTCGCGGGGCAGAAGTTC
CGGCGAGTAACGGCATGCCGCAAAGGACGCCGCTATTTTACGTCACTTCCTCTGCTCCCATTAG
>vicPac2 Gar-1 (SEQ ID NO: 161)
CCCGCCGGGCTGCTGGGAGAGAGGCGGTCCCTGACGCCAGCCATCTCCAACGGCAACCCCGCGGCGGTACTTCCT
GCAGCGCCCTAAGGTAAAGGACGCCGCTGTTGTACGTCACTTCCTCTGCTCGCGGTAG
>camFer1 Gar-1 (SEQ ID NO: 162)
CCCGCCGGGCTGCTGGGAGAGAGGCGGTCCCTGACGCCAGCCATCTCCAAGGGCAACCCCGCGGCGGCACTTCCT
GCAGCGCCCTAAGGTAAAGGACGCCGCTATTGTACGTCACTTCCTCTACTCGCGGTAG
>turTru2 Gar-1 (SEQ ID NO: 163)
CAAGCCGATCCGCTGGGAGAGGGGCGGTCCCTGACGCCAGCCATTGCCAAGGGCAACGCCGCGGGGCGGCACTTC
CTGCAACGTCACGCTGCAAAGGACGCCGCTATTGTACGTCACTTCCTCCGCTCGCCGTAG
>orcOrcl Gar-1 (SEQ ID NO: 164)
CAAGCCGATCCGCTGGGAGAGGGGCGGTCCCTGACGCCAGCCATCGCCAAGGGCAACGCCGCGGGGCGGCACTTC
CTGCAACGTCACGCTGCAAAGGACGCCGCTATTGTACGTCACTTCCTCCGCTCGCCGTAG
>panHodl Gar-1 (SEQ ID NO: 165)
CTTGCCGGGCCGCGGGGAGAGGGCGGGCCCTGACGCTAGTTATCTCCAAGGGCAACGCCGCAGAGCGGAACTTCC
TGCAACGTCATGCTTCAAAGGACGCTGATATTGTACGTCACTTCCTCTGCTCGCAGTAG
>dasNov3 Gar-1 (SEQ ID NO: 166)
GCCGCCAGGGACTGGGAGGAACAGCCTAATTCCCAACACCTCCCGTTTCCTAGGGCAACAAAGCGGCGTCACTTC
CTGTAACGCCCTGACGCAAAGGACGTTGCCATCCTACGCCACTTCCGCTACTCTCCGGTAG
>jacJac1 Gar-1 (SEQ ID NO: 167)
CAGGGGGGAAGGGAACCCCGGCGCCAGCATCTCCCAGGGCAACGCGGCAAGCACTTCCGGGGGGAGTCTGGAGAC
GGAGACGCCGTTATTTTACGTCACTTCCGCTGTCGCTCT
>eleEdw1 Gar-1 (SEQ ID NO: 168)
TTTAGAAAAAAAATTGGACCACTAACGCCAGGCATCTCCAAGGGCAACAAAGCCGTCCCACTTCCTAACGTCATC
AGGAAAGGCACGCTGTGCTTACGTCATTTCCTTTGCTTGACGGCAG
>tupChil Gar-1 (SEQ ID NO: 169)
GGGAGGGGCGGCGCCCGGGGCCAGCTGTCTCCCGGGGCAACCTCGCGGGGCGCTTCCGGCGACGCCATGCAGCCA
CGGACGCCGTGACGTCACTTCCGCCACGCAGCGCCGG
>ancestral_sequences4/1-143 Gar-1 (SEQ ID NO: 170)
CCTGCCCCGCCTCTGGGAGAGAAGGCGGATCCCTAACGCCAGCTATCTCCAAGAGCAACATTGCCGCAGCACTTC
CGGGACGTCGTGCTGCAAAGGACGCCGCTGTTATACGTCACTTCCACGGCTCAGCGTTAG
>ancestral_sequences7/1-143 Gar-1 (SEQ ID NO: 171)
CCTACCCCGCCTCTGGAAGAGAAGGCGGATCCCTAACGCCAGCTATCTCCAAGAGCAACATTGCCGCAGCACTTC
CGGGACGTCGTGCTGGGACGCAGCTATTATACGTCACTTCCACGGCGCCGCGTTAG
>ursus_thibetanus_thibetanus/1-191 Gar-1 (SEQ ID NO: 172)
CCGCCAGGTCCCCAGGAGGGGAGGAGGGGGTGTTCACTAACGCCAGCCATCTCCCAGGGCAACACCGCGGCGGCA
CTTCCTGCAACTTCTTGATTGAAAGGACGCCACCATTATACGTCATTTCCTACGGAGGCGTAG
>zalophus_californianus/1-191 Gar-1 (SEQ ID NO: 173)
CCGCCAGGCCTCCGGGAAAGGGGGCGGATCACTAATGCCAGCCATCTCCCAGGGCAACACCGCGGGGGCACTTCC
TGCAACTTCTTGATTCAAAGGACGCCACTATTATACGTCATTTCCTATGGAGGACTAG
>mandrillus_leucophaeus/1-143 Gar-1 (SEQ ID NO: 174)
CCCACCCCGCCTCTGGAAGAGAAGGCGGATCCCTAACGCCAGCTATCTCCAAGAGCAACATTGCCGCCGCACTTC
CGGGACGTCGTGCTGCGGAGGACGCAGCTATTATGCGTCACTTCCACGGCGCGGCGTTAG
>dipodomys_ordii/1-143 Gar-1 (SEQ ID NO: 175)
CCCGCTCCGCCTCCGGCAACAGCCATCTCCACCGGCGCCAACGCCGCGGCACTTCCGGGACGCCTCGGCGCGAAG
GACGCGGACCTTTGACGTCACTTCCGCCGCCCTCAGGAG
>chinchilla_lanigera/1-143 Gar-1 (SEQ ID NO: 176)
CATGCCCAATTCTTGGAAGAGGAATCGCGTCCCTGACGCCTGTTATCTCCAGGGGCAACACTACGGCAATACTTC
CGAAACGTCATATGTAAGGGACGCTAAACGTCACTTCCACTCCTTGGCG
>octodon_degus/1-143 Gar-1 (SEQ ID NO: 177)
CGTGCCTAACTCCGGGAATTGGACCCGCGTTCCGGACACCGCTGTTTCCTGGGGCAACACTTCCGTAAACGTCAT
AAGCAAGGGACGGCGACGTCACTTCCTGTGTTCCGCGGCG
>fukomys_damarensis/1-143 Gar-1 (SEQ ID NO: 178)
NNNNNNNNNNNCCCGGGAGAGGAGCCGGGTCCCAGACCTCTGCGGTCTCCAGGGGCAACGCCACGCAACACTTCC
GAAACGTCATGTGCGAGGGACGCTGTGCTCACTTCCGGTGGGCCACTG
>heterocephalus_glaber_female/1-143 Gar-1 (SEQ ID NO: 179)
CACGCCCCACTCCAGGGAGAGGAGCCGGGTCTCAGACGCCTGCGGTCTCCAGGGGCAACACCGCACAACGCTTCC
GAAACGTCATGTGCAAGGGACGTCGTTACGTCACTTCCGCGCCTTCCTG
>ictidomys_tridecemlineatus/1143 Gar1 (SEQ ID NO: 180)
CACGCCCGACTTCTGGGAGAGGAGGCGGGTCCCTAACTCCGCTATCTCCTAGGGCAACTCGACGGCAATACTTCC
GGAACGTCCTGACGTAATGGATGCCGTTTCGCTTTACTTCCGCTTTCTCTTGCTAA
>spermophilus_dauricus/1-143 Gar-1 (SEQ ID NO: 181)
GCCCGACTTCTGGGAGAGGAGGCGGGTCCCTAACTCCGCTATCTCCTAGGGCAACACGTCGGCAATACTTCCGGA
ACGTCCTGACGTAATGGATGCCGTTTCGCTTTACTTCCGCTTTCTCTGGCTAA
>urocitellus_parryii/1-143 Gar-1 (SEQ ID NO: 182)
GCCCGACTTCTGGGAGAGGAGGCGGGTCGCTAACTCCGCTATCTCCTAGGGCAACACGACGGCAATACTTCCGGA
ACGTCCTGACGTAATGGACGCCGTTTCGCTTTACTTCCGCTTTCTCTTGCTAA
>jaculus_jaculus/1-143 Gar-1 (SEQ ID NO: 183)
NNNNNNNNNNCCCAGCGGGGGAAGGGAACCCCGGCGCCAGCATCTCCCAGGGCAACGCGGCAAGCACTTCCGGGG
GGAGTCTGGAGAAGACGCCGTTATTTTACGTCACTTCCGCTGTCGCTCTAG
>myotis_lucifugus/1-143 Gar-1 (SEQ ID NO: 184)
GAGAGAGCCGGTCTCCACCTCCGGGGATATCCCGGGGCAAAGCCGCGGTGACACTTCCGGAACGTCAGGATGCCA
CGGACGCGGCTGTTTTACGCCACTTCCTTGGCTTGTCGGAAG
>pteropus_vampyrus/1-143 Gar-1 (SEQ ID NO: 185)
GGAGAAGGGTGGGGCCTCACCCCAGACGTTTCCTAGGGCAACACCACGGCGGCACTTCCGGAACGTTGAGATGCA
ACGGACGCCGCTATTATACGTCACTTCCTCGGCTCGTCGATAG
>choloepus_hoffmanni/1-143 Gar-1 (SEQ ID NO: 186)
ACCGCTCGGGGCCTAAGAAAGATTCTTAACGCCAGTCACCTCCAAGAGAAACAGAGCAGTTGCTCTTCCTGAACG
CCACGACGCAAAGGGCGTTGCCATTGTACGTCACTTCCTCAACTCTCTGGCAG
>dasypus_novemcinctus/1-143 Gar-1 (SEQ ID NO: 187)
GCCGCCAGGGAGCTGGGAGGAAAGCCTAATTCCCAACACCTCCCGTTTCCTAGGGCAACAAAGCGGCGTCACTTC
CTGAACGCCCTGACGCAAAGGACGTTGCCATCCTACGCCACTTCCGCTACTCTCCGGTAG
>procavia_capensis/1-143 Gar-1 (SEQ ID NO: 188)
TTCTCCAGGCTCCTGGATGAAGGGGCGGATCCTTAACGCCAACCATCTCCAACGGCAACAACGCAGGGGCACTTC
CTTTACGACAGGACGCAACGGAAGCTCTTGGCGTACGTCACTTCTGCTTGTCAG
>equCab2 Gar-1 (SEQ ID NO: 189)
CCCGGGCGCCGGAGAGGGCGGGACCCCTGACGCCGCCGTCACCAAGGGCAACCCTGCGGGCACTTCCTGCAAACG
TCGCGCCAAAGGACGCCGCTATTACACGTCACTTCCTCTGCTCGTCGGTAG
>cerSim1 Gar-1 (SEQ ID NO: 190)
CCCCCGGGCCGCCGGGAGGGGGTAGACCCCCGACGCCGGCCGTCACCAGGGCAACAGCGCGCGGCACTTCCTGCA
ACGCCGCGAGGCAGAGGACGCCGCCATTATACGTCACTTCCTCTGTTCGTCGGGAG
>felCat8 Gar-1 (SEQ ID NO: 191)
CCGCCGGACCCCCGGGAGAGGGAGCGGATCACCAACGCCAACCGTCTCCCAGGGCAACACCGAGGCGGCACTTCC
GGCAAGGTCTGGATTCAAAGGACGCCACCATTATACGTCATTTCCTCTGCTCCTCAGTAG
>musFur1 Gar-1 (SEQ ID NO: 192)
CCCGCAGGCTCCCGGGAGAGGGGGCGGATCACTAACGCCAGCCATCTCCCAGGGCAACAGCCTGATGGCACTTCC
TGCAGCTTCTTTGCAGTCAAAGGACGCCACTATTAAACGTCACTTCCTACGTAGGTGAAG
>ailMel1 Gar-1 (SEQ ID NO: 193)
CCGCCAGGTCCCCAGGAGGGGAGGAGGGGGAGTTCACTAACGCCAGCCATCTCCCAGGGCAACACTGCGGCGGCA
CTTCCTGCAACTTCTTGATTGAAAGGACGCCACCATTATACGTCATTTCCTACGGAGGCGTAG
>odoRosDiv1 Gar-1 (SEQ ID NO: 194)
CCGCCAGGCTTCCGGGAAAGGGGGCGGATCACTAACGCCAGCCATCTCCCAGGGCAACACCGCGGGGGCACTTCC
GGCAACTTCTTGATTCAAAGGACGCCACTATTATACGTCATTTCCTATGGAGGACTAG
>lepWed1 Gar-1 (SEQ ID NO: 195)
CCGCCAGGCCTCCGGGAAAGGGGGCGGATCACTAACGCCAGCCATCTCCCAGGGCAACACCGCGGCGGCACTTCC
TGCAACTTCTTAGATTCAAAGGACGCCACTATTATACGTCATTTCCTACGGAGGACTAG
>pteAle1 Gar-1 (SEQ ID NO: 196)
CCTGCAGGGCTGCTAGGAGAAGGGCGGGGCCTCACCCCAGACGTTTCCTAGGGCAACACCACGGCGGCACTTCCG
GCAACGTTGAGATGCAACGGACGCCGCTATTATACGTCACTTCCTCGGCTCGTCGATAG
>pteVam1 Gar-1 (SEQ ID NO: 197)
CCTGAAGGTCTGCTAGGAGAAGGGTGGGGCCTCACCCCAGACGTTTCCTAGGGCAACACCACGGCGGCACTTCCG
GCAACGTTGAGATGCAACGGACGCCGCTATTATACGTCACTTCCTCGGCTCGTCGATAG
>eptFus1 Gar-1 (SEQ ID NO: 198)
CCCACGAGCGGCTGGAAGAGGGCCGGTCTCCACCTCCTCCCTCCCGGGACATCCCGGGGCAACACCGCGGTGACA
CTTCCTGGAACGTCAGGATGCCACGGACGCGACTATTTGACGCCACTTCCTTGGCTTGTCGGAAG
>myoLuc2 Gar-1 (SEQ ID NO: 199)
CCGACCGGCGGCCAGGAGAGAGCCGGTCTCCACCTCCGGGGATATCCCGGGGCAAAGCCGCGGTGACACTTCCTG
GAACGTCAGGATGCCACGGACGCGGCTGTTTTACGCCACTTCCTTGGCTTGTCGGAAG
>loxAfr3 Gar-1 (SEQ ID NO: 200)
CCCTCCTGGCTCCCGGGAGAGGTGGCAGAGCCCTAACGCCATCCATCTCCAAGGGCAACAGCGCAGCGGCACTTC
CTTTAACGTCATGATGCAAAGGACGCTACCTACGTCACTTCCTCTGCCCGTCGTCAG
>triMan1 Gar-1 (SEQ ID NO: 201)
TCCTCCTGGCTCCTAGAAGAGGGGGCGGATCCCTAACGCCAGCCATCTCCAAGGGCAACAACGCGCCGGCACTTC
CTGTAATGATGCAAAGGACGCTGCTGCCGTACGTCACTTCCTTGACTCGTCGGTAG
>chrAsi1 Gar-1 (SEQ ID NO: 202)
ACCTCCGGGCCTCTGGGAGAGGGGAGGATTCCTAACGCAGGTCGTTTCCAAGGGTAACAACGCAGCGGCACTTCC
TTCAACGTGTGGACGCAACGGACGCTGCACGTCACTTCCGCTGCCTGTCCGTTG
>oryAfe1 Gar-1 (SEQ ID NO: 203)
TCCTTCAGGCTGTTGGGCGTGGGGGCGGATCCCTAACGCCAGCCATCTCCAAGGGTAACAACGTGTGGGCACTTC
CACACGTCATGATGCAAAGGCCATTACTATTGTACGTCACTTCCTCTGCTTGTCGGTAA
>mouse 7sk-1 (SEQ ID NO: 204)
GAGAGTAAGCAGGCTCTTGGTAGGTATATAAGGCCATAGAATTTTGTAACTTTACACATGTGGTGACCTTATGTA
GCCGACTGTACTTGATATTATAACAAATCCTGAATCCGTTTTAGGGTTAAATAATCCTTTTTATACTCGCTTCGT
TCTAAGTTTAAATTAAAATACTTAAATTTAGGATGTTTTTACTGTTAACCAAAATGCTTTGGGGCTATGCAAAAT
ACAACAGTTTGGATTGGTTAAACCTTCCGAAGCCCCGCCCCCGACGGCCATGTCT
>CD2AP_Bidirectional_Promoter (SEQ ID NO: 205)
AGCGAGCCCAAGCTCCTCTGCACCGCTTCCTCATCCGCTCGCTGCACCTGGACGCGGTCGGCGCGCGACCCCCGG
CCGTGACGTCACCGCACCTGGCAGCAGCCGTGGGGACCGGGAGAGAGCCCGAACGCGACGGGGCGGGGTGGGGCG
GGGAGAACGAGGGCGTTCTCGCGAGATTTGCCTCCTCCCGGTCCCAGCTCCCCGCACCTTCTCGGCCTCTGTCTG
GGTCCCCACCTTAGTCTACGGTGTCGCCTTTTCTAACTGCGAGTGCTAAGGAAGAGGCGAGGGGCGGGCTCCGAG
GCTAGGCGGGCGCTCGGGGTTGGAGCCGAGGGTCTGGGCAAACCGGTGGGTCCCTCCCCACTGCGGGAGCGGCCA
GGGTGGGAAAACCGCGGTCGGGCGGGCGGGGTAGGGCCCTCCCGCCGCCGTGGCTCCTGGGGAGGCCAGGGGTGA
GGAGCTGTCGCCGCCTTTGCCTCTGCCTCGAGGGCCGCGCTGAAGAGACTGGTAGGAGAGCGCCGCGGGCGGATG
GAGGCGACTCTTCGCCCCGCCTGAGCTCAGGAGGGGCTAGCGCGGAGCGCGGGTCCCGCCTCCAGCCGCGGGAGC
GGCCGCGCGAGCCACCACTGGAGGAGGAGGAGGAGGAGCGGACGTCGGCTTCTCCCCGCGGGAGCCCCCAGC
>DCTN6_Bidirectional_Promoter (SEQ ID NO: 206)
ACGCGACGCAAACAAGAGTCGCAAGCTTCCGGGTCCCCGCCCCACCCCGGCTCCGCCCCTCCCCCAACCCTGCCA
GGCTCTCCAATCGCATGTGGAATTATCGCTCTACCCAGGCGGTGGTGTCGATCTACGTTCCAATTGGGGCCGTAC
C
>EMBP1_Bidirectional_Promoter (SEQ ID NO: 207)
AAAACCTTACACCTGCGCAAAAATAAGCCTCCCTCATAAGAAAGCCCAAAGATGTCCGGGGTCGGGGAGGAGGAA
AGTGTCTCTCATCTGTCCCATCAACGAAAATTAGTGAAATCTGCCTCAGATGAAGTGCAAAGGCCAGTCTGCAGG
GATAGTTTCAACCTCTCCCCACGCGATGGGCTACACATCACCTGCCCAAGCTCTCTCCCGACCTGCTAGAGCCTA
GAGGGCGGAGGCCGGAGAGGCTGCAGCCGGGAGTAGCACCGCACATCCGGGAACGCC
>EP400NL_Bidirectional_Promoter (SEQ ID NO: 208)
ACCCGTCTACAGTGGACACGACGAAACCAGGGACATGTCCCACCATTTCAGTGGTCACAGGCAAGAGTCTTGTGG
ATCTTCGGATCCCACGTAACATCTCATCTCCCTAGGCACCCCGACTCCCCTGCCCAATTTAAAACAGACCTCAGC
CTGCCCCATCCCGGCTGCTTTGCCTGGTGCTCTTCTAACTGCATGTTTATCTATCCTCCCCGCCTAGACTGTAGG
GCCCGCGAGGGGAGCCGCTAGCTGTGCTTGTCAGTGTGACCAGCGCTCAGCAGGTGTCCGGCGGGAGGGCGGGCA
AATACAACTCAGTGCCCACGTGCGAATGAATGAACAAACTAGTTCCGGGCGGAGCCAGAGGCGCGCGCCGGCGCG
GACCGAGGCCCGGCCCTATCCGCCCCGCCCCCTCCGCCCCGCCCCCTCCGCCACGTCCCTCCGGGTCCGCTGGGC
GCTGATTGGTCCGAGCCTCGCCTGCGCAGTGCCGGGCCGGCTCCCGCGCTTGC
>FCHO21_Bidirectional_Promoter (SEQ ID NO: 209)
CCGACTCCACTGCCGCTGGCTGGCCCTTCTCTTCCCTCTGTCCCTGGGCCAGTGCCCGTCGCACCACAAACAGTG
CGAGCAGTCTCCCCGGTGACTCCTCAAGGACCCAGTTCTCCACCATTCCTAAGAGAACACTCAACCCAGCCGCGC
CCGGGATGCAGAGAGATCTACCAACACCCGAGAATGGGGACAGGGCGCATGCGCACACCGTGGCCGTGGCGTCTA
AGTGCTCGCCCAGCTGCGGCAGCCGCTAGGTGGCGCATGCGCCCTGGAAGGTGCGGGCCGGTCTCTGGGAAGAAG
GCGGCGGCGGCGAAAGGCGGGGGTGCTGTGGGGGCCGGGCCGTGTTT
>FCHO22_Bidirectional_Promoter (SEQ ID NO: 210)
CCGACTCCACTGCCGCTGGCTGGCCCTTCTCTTCCCTCTGTCCCTGGGCCAGTGCCCGTCGCACCACAAACAGTG
CGAGCAGTCTCCCCGGTGACTCCTCAAGGACCCAGTTCTCCACCATTCCTAAGAGAACACTCAACCCAGCCGCGC
CCGGGATGCAGAGAGATCTACCAACACCCGAGAATGGGGACAGGGCGCATGCGCACACCGTGGCCGTGGCGTCTA
AGTGCTCGCCCAGCTGCGGCAGCCGCTAGGTGGCGCATGCGCCCTGGAAGGTGCGGGCCGGTCTCTGGGAAGAAG
GCGGCGGCGGCGAAAGGCGGGGGTGCTGTGGGGGCCGGGCCGTGTTTACACAGCGGCGGGCGGGCGCGGACGCGG
AACCCGGCGCGGCGGCGGCACG
>KMT5C1_Bidirectional_Promoter (SEQ ID NO: 211)
CGCGGGGCGGGAGGGGAGAGGGATGGCGGTGCGCGCGCATTCACCGCCTCCCTCCCGCCGGGTCTGGCTTTCTCC
CTCCTGTGGCCGAAGCTTTCCTCGGAGAAATAGAAGAGGGAGGCCGCGACTCTATGGTGATGGACGGAGGCCTTA
CCCAATGGAAAGAGGAGCTGTCCCAAGGCCAGGCAATCATATACGACTACTGGAGCTGGCAGAGCCCGCCCTCTT
TCCACTTGGACCTGAATAACCCGACCCAAACCGAGTTTCGCCCGGAGAGACTGCGCTTTCGGCCAATGAGTGCGT
CGATTTCGAGCCCCAGTGTGAGCGAAGGCGGGACAAGTCTCCATGGCAGCGACTAAAGGACAGCGATGTGAACCA
CTGACAACAGTTCGCGGCGTTTGACGGCGGCGGGGGCGTGGCGGGGTTTTATCTGTGTATTGACGAGAGCCGGGC
GCGGAGGGAAAGAGTGGGGCTTGGCCAATGGGAGCGCCGTGAGCTTCGTAGCAACGGAGGAGTGGCGGTGGCTGT
GGCCAATAGAAAGCCTCAGTGGCCTTGGCGGGGCTGGCCCGGAG
>KMT5C2_Bidirectional_Promoter (SEQ ID NO: 212)
CGCGGGGCGGGAGGGGAGAGGGATGGCGGTGCGCGCGCATTCACCGCCTCCCTCCCGCCGGGTCTGGCTTTCTCC
CTCCTGTGGCCGAAGCTTTCCTCGGAGAAATAGAAGAGGGAGGCCGCGACTCTATGGTGATGGACGGAGGCCTTA
CCCAATGGAAAGAGGAGCTGTCCCAAGGCCAGGCAATCATATACGACTACTGGAGCTGGCAGAGCCCGCCCTCTT
TCCACTTGGACCTGAATAACCCGACCCAAACCGAGTTTCGCCCGGAGAGACTGCGCTTTCGGCCAATGAGTGCGT
CGATTTCGAGCCCCAGTGTGAGCGAAGGCGGGACAAGTCTCCATGGCAGCGACTAAAGGACAGCGATGTGAACCA
CTGACAACAGTTCGCGGCGTTTGACGGCGGCGGGGGCGTGGCGGGGTTTTATCTGTGTATTGACGAGAGCCGGGC
GCGGAGGGAAAGAGTGGGGCTTGGCCAATGGGAGCGCCGTGAGCTTCGTAGCAACGGAGGAGTGGCGGTGGCTGT
GGCCAATAGAAAGCCTCAGTGGCCTTGGCGGGGCTGGCCCGGAGAGCAGATGGGAGGTGCGGCGACAGTGTTTGA
CGAGAGCCGAAGGAGGCTGTGGGAGGTGTTGGCGGCGGCGGCGCGGGCGCCTGAGGAGGAGGAGGAGAAGCGGGT
GAGGGGCGGCGCGGGGCCCGATCTCTGAGCCCCTTCACGGCCCCAGCCCCGCGCCGCCTTGGCTCCCCAGTCGCC
CCCTGCCCCGACTGCCCCCCACCCCGCCCGGCCCCTCCTCGTGTCCAGGCGCCCAC
>LZTR11_Bidirectional_Promoter (SEQ ID NO: 213)
TGAAGGAGCTGAGGCCCTGCTAAGTAGGAATGAGAATCCAGAGGCTCCTCGCCGGGCTGCCTCTCAGTCAGTAAG
AAAGCCAAGGGGAGAGGGGAGTTGCTGGGGGTCAGGGCTGAGGGCGCTAGCAGGAAAGGGAGCGTTGAGCCGCCT
GCAGAGGCCGCTGCGAGCCCGGAACCCTCCATGGGGGATCCCGGCAGCGGCAGACGATCCAGGCCGGAGCCACGC
GCAGACCCAGGGCATGCCGGGAACTGCGAGCCGGCCGCGGGTCTTCGGGCTGCGTGGGCCTGGGAGGCGCCGGGA
AGAGCAGTCGCGACGGGGCTAGGGACGACACACTGCATTCACTGGAAGGGACAACGCAGCGCCAGTACATAGCCT
GAAACGCTCCCCAGAAGGTCCCACGCTCGCCGCGCGGTCGACAACCGCATCCTGCGCTCGCCCGCGGTGTCTCGG
CAAGCGGTAGGCTTGTCGGGAAGAGCTGGAGGGCGCAAGTGCGGCGCTGGCCGGACGTGCCGC
>LZTR12_Bidirectional_Promoter (SEQ ID NO: 214)
TGAAGGAGCTGAGGCCCTGCTAAGTAGGAATGAGAATCCAGAGGCTCCTCGCCGGGCTGCCTCTCAGTCAGTAAG
AAAGCCAAGGGGAGAGGGGAGTTGCTGGGGGTCAGGGCTGAGGGCGCTAGCAGGAAAGGGAGCGTTGAGCCGCCT
GCAGAGGCCGCTGCGAGCCCGGAACCCTCCATGGGGGATCCCGGCAGCGGCAGACGATCCAGGCCGGAGCCACGC
GCAGACCCAGGGCATGCCGGGAACTGCGAGCCGGCCGCGGGTCTTCGGGCTGCGTGGGCCTGGGAGGCGCCGGGA
AGAGCAGTCGCGACGGGGCTAGGGACGACACACTGCATTCACTGGAAGGGACAACGCAGCGCCAGTACATAGCCT
GAAACGCTCCCCAGAAGGTCCCACGCTCGCCGCGCGGTCGACAACCGCATCCTGCGCTCGCCCGCGGTGTCTCGG
CAAGCGGTAGGCTTGTCGGGAAGAGCTGGAGGGCGCAAGTGCGGCGCTGGCCGGACGTGCCGCACCGTCAGCGCA
GGGCTCGCCGGGAAATGTGGTTTCTCCAGCCGGCCCGGGGCGGTGGCCGCAAGTTGGGCTTACAGCGCGGCCGAT
CCGGCGTGGACCCGGG
>PATJ1_Bidirectional_Promoter (SEQ ID NO: 215)
GAGTCGGGGCGAGGGGAGGGCCTGCCAGGTGAGGCGCGGTC
>PATJ2_Bidirectional_Promoter (SEQ ID NO: 216)
GAGTCGGGGCGAGGGGAGGGCCTGCCAGGTGAGGCGCGGTCACCCTGGGCCTCTCACTTCCGCCCAGGTGAGGCA
GGGCCGACACCGAGCCCGCCCGACCCGGGCTCCCACCTGCTCCTCCAGCGCACCAG
>PCNX11_Bidirectional_Promoter (SEQ ID NO: 217)
TTCACAAATATCATAAATGACAGGCAGGACGCTTTTCTGGAGTCAAGATCTGTTAGTTTCGGAGTCAGAAAGACC
CCGTTTAGAGACTCGTAGGCGAACTTGCCAGGGGGCCTACCAGGGGCAGAATGGGGTCCTCCGGACCAGCCAGCC
GCGTCTCAGCCACCTCCGCAGCCCCCGGGGCCCTGAACCCCGGCCGCGTTGACGCGCGCTTCTCCCGGACGTCGG
CAGGAGGCGCCCGCGGCGGACCAGGCGCGGCGCGCACCGTAGCCGGCCCAGGGGGCGGAGGGAGCGGA
>PCNX12_Bidirectional_Promoter (SEQ ID NO: 218)
TTCACAAATATCATAAATGACAGGCAGGACGCTTTTCTGGAGTCAAGATCTGTTAGTTTCGGAGTCAGAAAGACC
CCGTTTAGAGACTCGTAGGCGAACTTGCCAGGGGGCCTACCAGGGGCAGAATGGGGTCCTCCGGACCAGCCAGCC
GCGTCTCAGCCACCTCCGCAGCCCCCGGGGCCCTGAACCCCGGCCGCGTTGACGCGCGCTTCTCCCGGACGTCGG
CAGGAGGCGCCCGCGGCGGACCAGGCGCGGCGCGCACCGTAGCCGGCCCAGGGGGCGGAGGGAGCGGAGAGGAGG
AGCTGGAGGGGGCGCGGCTTCCTCTCGGTCG
>PCNX13_Bidirectional_Promoter (SEQ ID NO: 219)
TTCACAAATATCATAAATGACAGGCAGGACGCTTTTCTGGAGTCAAGATCTGTTAGTTTCGGAGTCAGAAAGACC
CCGTTTAGAGACTCGTAGGCGAACTTGCCAGGGGGCCTACCAGGGGCAGAATGGGGTCCTCCGGACCAGCCAGCC
GCGTCTCAGCCACCTCCGCAGCCCCCGGGGCCCTGAACCCCGGCCGCGTTGACGCGCGCTTCTCCCGGACGTCGG
CAGGAGGCGCCCGCGGCGGACCAGGCGCGGCGCGCACCGTAGCCGGCCCAGGGGGCGGAGGGAGCGGAGAGGAGG
AGCTGGAGGGGGCGCGGCTTCCTCTCGGTCGCTCCCTGGCGCCGGGCCTCTTTCTCTGCCTGGCCCAGGGCTGGC
GGCCGGCGGGGGTCGCGGCGGCGGCAGTGGGGGCGCTGGCGGGCCGCGGGTGGCGGGGGCCGGGCCGCGGCTCCG
GGTGTTAGGAGACAAGATGGCGGCGGCTCTCAGAAGGCCGGTCTCCTCCTCTCCGCCGTCCTCCGCCCCGCCGCT
CGCCGCCTCCTCCTCTCGGGTCTCCTCCTCCTCGTTTGCTGCCTCCTCCTCCTCCTGCAGCAGCACCAGCGACCG
CCGAAGCGCCGGCTCGCTCACCCGGAGCTCCGGAGGTGGATAGACGGGGCAGCTGCAGGCTCCGGCGACCGAGGC
CGAGCTGGGGCCGGGGCGGGGACGGCGGCGGCGGCGGCGGCGACGGCGGCGGCGCCGGGTGGGG
>PTGERN_Bidirectional_Promoter (SEQ ID NO: 220)
AATTTTTGGCATAGGCCAAGCGGCTGGTTGGTGGGGTGTTTAGCTCAGGACGAGAGGCCGAACGAGCGGGGAGTT
GGCTGAGGATAGACTAGACACGCGTGGGTGACTCCAGCGTGATGGAACGCGGGGTGTCCCGGGATAGGGCTAAAG
CGATGGGATTTCCAGACGAGTCTTTCCCAGGCCAACTTTTAAAGGTCGGAGGAAAGTTTCTCGTGGGGTGGGGGC
CCAGAGGGGATGGCAGGGTGGGCTCCGACGCCTCCTCGCCTTTAAGCGGGTGGCCCCGGCTCTTCCTCCGTTACC
TGGAGCGGGGAGGGGCTTGGGAAAGTTTGTGTTTGTTGCTGGCAAAGCGCCGGATGGGAGGCGCGGGCGGGCGCT
GCGGTTCTTCCCTTCT
>RMRP_Bidirectional_Promoter (SEQ ID NO: 221)
ACGTCCTCAGCTTCACAGAGTAGTATTTTATAGCCCTAAAGAAATTGTGTTTTATGATTAGGGTGAGAAAGTTGG
TGGCGTGAGATTAAAAAAACCGTTTTCGGGCATAACTTTCTAAGACTATAGGCTTTCAGAGGCATTGTGGCTAGC
AGAATAGCTAATAGACACGAAATGAACAAATACAGGAAAGCTAGAATGACACTATCTTATGCAAATATGGTCTGG
CCCCGCCCTACGGGGAGTGGGCGTGGCCTCCCCGGAGCCGGCCGGCCTGCTCGCGTGCGCGTGCGCGTTGGGGCG
GCCGGCCAATGCCGGACCGCTTCGGCACCGCCCGCCCGATCCCTCCACCCGTGGGCCGGCA
>RNF1871_Bidirectional_Promoter (SEQ ID NO: 222)
CCAGGACCTTGCAGGTGGAGAGCATAGTTGCCAAAATCAAGGCGGAGGAGCGCACCGCCGCTAGGATCCAGGCGG
AGAAGCCCACCGCGGCCAGGACCTAAGGATGCAGTACACTGCTGCCAGGATCTTGTCTGTGGAGCGCAGCGCGGC
CAGGACCTCCGGCTGCAGCACACCGCTGCCAGGATCTTATCGGCAGAGCGCTCCGCGGTCCGGACCCCGCCCCGT
GCGCGTCCCCGACCCCGCCCC
>RNF1872_Bidirectional_Promoter (SEQ ID NO: 223)
CCAGGACCTTGCAGGTGGAGAGCATAGTTGCCAAAATCAAGGCGGAGGAGCGCACCGCCGCTAGGATCCAGGCGG
AGAAGCCCACCGCGGCCAGGACCTAAGGATGCAGTACACTGCTGCCAGGATCTTGTCTGTGGAGCGCAGCGCGGC
CAGGACCTCCGGCTGCAGCACACCGCTGCCAGGATCTTATCGGCAGAGCGCTCCGCGGTCCGGACCCCGCCCCGT
GCGCGTCCCCGACCCCGCCCCGTGCGCGTCCCCGGCGTTGGCGTCTTCGTCCTGTTGCTGGTCTCCGTCCGGTCG
CCGGCCGTCTAGGTCTCCGGCCCTCCCCAGCCGCTCCTGCGCCCTTGCCGGCCCCGCCGCCCGCAGC
>SAMD4B1_Bidirectional_Promoter (SEQ ID NO: 224)
CGCCCACTGAGGACAGCCTTGGGTGAGGCGGGCCACCCAAGGGGGGGGAAGAGGAGGCCTGGAACGCCTGAATC
AGGAACTGTGACTTCGCTCGGGGCAGCTGGGGTGGACGCGCGCGAGCCTGCCCCCTGCGGGCCTGGAGGCCCAAC
CTCAGACTCCGCCGGGCCCGTTGCCCTGGGCAACGCCCCGCGCGCCCCGCCCCTTCCCCGCCCCCCAGCCCCAAA
CCCCAGGCCTGGCCGACTGCCCGTCACCCCCACGTCCGACCAATCCCGCCGAGGAGGGGGCGGGCCTCTTGGGCC
CCGTTCCACCACCGTCGCTCCCCCCTCGCCGCGACCCCGCCTTACTCGGCTCACACCTCCCGCCCTTCGGGCTGC
CCTCGCCGCCCGTTGGCTGGCGCGCCGTTCGTCACCCGGGCGTGAGCTAATGCCGGCGCGCGGCGGCCCCCGTCG
GGGCGGGGCCAGGGGCGGTGACGCACGGCGCGGTGACGCAGCGCGACGGCGGCGGCGGCGGC
>SAMD4B2_Bidirectional_Promoter (SEQ ID NO: 225)
CGCCCACTGAGGACAGCCTTGGGTGAGGCGGGCCACCCAAGGGGGGGGAAGAGGAGGCCTGGAACGCCTGAATC
AGGAACTGTGACTTCGCTCGGGGCAGCTGGGGTGGACGCGCGCGAGCCTGCCCCCTGCGGGCCTGGAGGCCCAAC
CTCAGACTCCGCCGGGCCCGTTGCCCTGGGCAACGCCCCGCGCGCCCCGCCCCTTCCCCGCCCCCCAGCCCCAAA
CCCCAGGCCTGGCCGACTGCCCGTCACCCCCACGTCCGACCAATCCCGCCGAGGAGGGGGCGGGCCTCTTGGGCC
CCGTTCCACCACCGTCGCTCCCCCCTCGCCGCGACCCCGCCTTACTCGGCTCACACCTCCCGCCCTTCGGGCTGC
CCTCGCCGCCCGTTGGCTGGCGCGCCGTTCGTCACCCGGGCGTGAGCTAATGCCGGCGCGCGGCGGCCCCCGTCG
GGGCGGGGCCAGGGGCGGTGACGCACGGCGCGGTGACGCAGCGCGACGGCGGCGGCGGCGGCGGCGGCGGTGGTC
GGTGCGGGAGGAGGGAGGGGAGCTTGCGGGCCCGAGA
>SAMD4B3_Bidirectional_Promoter (SEQ ID NO: 226)
CGCCCACTGAGGACAGCCTTGGGTGAGGCGGGCCACCCAAGGGGCGGGGAAGAGGAGGCCTGGAACGCCTGAATC
AGGAACTGTGACTTCGCTCGGGGCAGCTGGGGTGGACGCGCGCGAGCCTGCCCCCTGCGGGCCTGGAGGCCCAAC
CTCAGACTCCGCCGGGCCCGTTGCCCTGGGCAACGCCCCGCGCGCCCCGCCCCTTCCCCGCCCCCCAGCCCCAAA
CCCCAGGCCTGGCCGACTGCCCGTCACCCCCACGTCCGACCAATCCCGCCGAGGAGGGGGCGGGCCTCTTGGGCC
CCGTTCCACCACCGTCGCTCCCCCCTCGCCGCGACCCCGCCTTACTCGGCTCACACCTCCCGCCCTTCGGGCTGC
CCTCGCCGCCCGTTGGCTGGCGCGCCGTTCGTCACCCGGGCGTGAGCTAATGCCGGCGCGCGGCGGCCCCCGTCG
GGGCGGGGCCAGGGGCGGTGACGCACGGCGCGGTGACGCAGCGCGACGGCGGCGGCGGCGGCGGCGGCGGTGGTC
GGTGCGGGAGGAGGGAGGGGAGCTTGCGGGCCCGAGAGGGGGCGACGGCGGCGGCGGTGGCCTGAGGAGGCCCGA
GCGGCGGCGGTGGCGGCGAAGGCCGAGGCG
>SETD1A1_Bidirectional_Promoter (SEQ ID NO: 227)
CGGAGGCGCCCCCTAGTCCCAGGCTCTGCACGCCCTGGCCCCGCCCCTTGACTCGGCCCCGCCCACAGCGGAATC
CGCAGATTCGCCAGGTCGG
>SETD1A2_Bidirectional_Promoter (SEQ ID NO: 228)
CGGAGGCGCCCCCTAGTCCCAGGCTCTGCACGCCCTGGCCCCGCCCCTTGACTCGGCCCCGCCCACAGCGGAATC
CGCAGATTCGCCAGGTCGGATCCTCAGAATTCCTCGGGTCCCTCGATACTCGGCTGAAAATTCTCATCGGACTCT
GAGAGGAGCGCTGGGCTGGAGGCATTTTCCCCAGGGACAGAAGCGGGCTATTCTCTCACTTGGGCCAGTAAGAAA
AATCCAAAAAAAGTTGTCGACTCTGCCAGCAGGGATTGGCTAACGGGCCGTTATTTTCTTGACTCCACCAAGGCG
GATGAAGGGGAGGCTACGGCTGAGGCCGGGAACAGTGGCGAATCTGCAGCCTCTCAGAATTTGGCAGTGCAAGGA
AGGGACGGGGAAGAGAAGCAAAGCGGCGCGCATCCTGTCCAGCGATTCGCCCCGCCCGCCCGGTGAATCTGCGTC
TGCAGAACGCGCCACTGAAGGTTCCCCAGCGCTGGCTGGCCTCCTCCCCTCCGCCCCGCCCCTTTTCCTCAGGGA
CTAGTCGCAGCTTTCGTCGCCGCCGATTCGTCAAGGTCCCGGGCCGCAGCATCTAGATCGTCGTGGCGAAGCCGA
CTCTCCGGGGGATGCGGCCAATCTCCAAGCTCCCTGGGCCGCAACTTCCGAGCCTCCCAGGGCGCCGGCCGAGGC
GAAGCCGCTACCCTCGGCCCCGTGGGTCCCCCGGCAGCGCCTGTGGCGAAA
>SNORD651_Bidirectional_Promoter (SEQ ID NO: 229)
GATATCTTTTTTTTTTGAAGCGAGTTTTAACAAGATCAGCTGTTTATTCATTCCACTATGGGGTTGAAGGGATCA
TTGGCCAGCTCAAGGCTTACCTTCTCTTGGGCTGAGATGCTGCTGCCAGCTCTAAAACAGCACTCTGTTCTCAAA
ACCTGGGGGAATGGAGAAGGCGCATACACCTTAGAGACTGCAGATGCAGAGCAGGACAGGCATTTCTGATGACAG
TCAATTAATGACTTTACAAATTTAAGTCCATCCTAACAAAAGCCCCTT
>SNORD652_Bidirectional_Promoter (SEQ ID NO: 230)
GATATCTTTTTTTTTTGAAGCGAGTTTTAACAAGATCAGCTGTTTATTCATTCCACTATGGGGTTGAAGGGATCA
TTGGCCAGCTCAAGGCTTACCTTCTCTTGGGCTGAGATGCTGCTGCCAGCTCTAAAACAGCACTCTGTTCTCAAA
ACCTGGGGGAATGGAGAAGGCGCATACACCTTAGAGACTGCAGATGCAGAGCAGGACAGGCATTTCTGATGACAG
TCAATTAATGACTTTACAAATTTAAGTCCATCCTAACAAAAGCCCCTTAAGACCTAATTAGAGGTAATTTTTCTA
AGTTTTTGTAAATTATTGAGGACTACAAATCTTAATTAGCTTCTCAGTAGGTTGTAATTTTTTTTTTTTTTTTGA
GATGGAGTCTCGCTGTTGCCCAGGCTGGAGTGCAGTGGCACGATTTCGACTCACTACAACCTCCGCCTCCCGGGT
TCAAGCGATTCTCCTGGCTCAGCCCCCAAAGTAGCTGGGATTACAAGTACACGCCACCACACCCGGCTAATTTTT
GTATTTTTGGTAGAGATGGGGTTTCACCATGTCGGCCAGCCAGGCTGGTCTTGAACTCCTGACCTCAGGTGATCC
ACCCACCTTAGCCTCCCAAAGTGCTGGGATTACAGGCCACTGTGCCCAGCCTCAGGGGAGTTGTAATCTCCATTT
CAGTCATATCAATTTAAACTTCACAAAGCTAAGATTACTTTTCCTTTTCACATCTGAGGAAAACTACATCTC
>SPDYA1_Bidirectional_Promoter (SEQ ID NO: 231)
AGGGAGGGGCGGGGTTCGCCGGCGCGCACTCCCAGGCAGGCCCCGCCCCCTCGGCCGGCTGTGCGCGCTGATTGG
CCCCTGCCGGCCTCGCGCTCCCTCGCTCCGGGTTGGCGGGAGACCTTAGAGC
>SPDYA2_Bidirectional_Promoter (SEQ ID NO: 232)
AGGGAGGGGCGGGGTTCGCCGGCGCGCACTCCCAGGCAGGCCCCGCCCCCTCGGCCGGCTGTGCGCGCTGATTGG
CCCCTGCCGGCCTCGCGCTCCCTCGCTCCGGGTTGGCGGGAGACCTTAGAGCGGGTACCGCTGCTGGCTAGCGAC
CGACGAGCAACCGTCTGAGGCCAGGAGCGCTGCGACGGAGCCTTGACCGCCGTTGCCCGGCCCTCTCCCGCGCAG
CCCCGGGCTTCCGCAG
>SRP_Bidirectional_Promoter (SEQ ID NO: 233)
GGTCGGATACCGGCGCAGAATAGCACTAGAAGCTGTGGTATGGTGACGTCATCAACTGGGCCAGCCCACAACGCC
TCTAAGATTTCATTTTACTCACCCAGCGAAACAACCTGACCACACTGCGCACGCGTTTCCTTTGAGCACTGCATT
CTGGGTAAACTGTCTCAAAAATTTGAAGAGCGCATGCGTGGGCCAGCTTCTTCCTTTTACCTCGTTGCACTGCTG
AGAGCAAG
>TAF151_Bidirectional_Promoter (SEQ ID NO: 234)
CTCAGGGTCAGATTCGTGTACGATTTCGTTTTAATGTACCCTTTTCTTCCAGCATCCTTGTTTGCTACTCGGCGA
GACAGTTACAACAAACCGGGAAGCGATCAGGTACGCGAGCTGGTCACGACTCACAGTCCCAGAGCTCGCCGACTC
CGAACGCCCCCAGGTGGCCCAAGCACTCTGCAGCAAAAGCCGCCAGCTAGGACGTACCATTCGAAATTGTAGGGA
AAGAAAGGCTTTGCATAACCAAATACTCTGTGTTTATAAGGTCCCTCCTCTTTCGTTTCCTAACCGCAAATTCCA
TCACACCCAATAAAGTGAGAAATAGGATTGTAAATAAGACGGAGCAAGTAGGTTCCACTTCCTCCCCGATCGTGA
TCGTGGCATTGGTACTTTCTCTTCTCAATTCCCTCTCAATAATGGTACGGCTAGCGGAGGGGGGAATAGAGGGCC
CTGGGAAGGCCTCAGGGCTCGGCGGCTAGTACCAGTGCAGAAACATCCCTCCTGCCGCAGCTTTGTGGTACCACC
CGCTGCCCGCTGATTGGCTGCCGGGGTCCCGC
>TAF152_Bidirectional_Promoter (SEQ ID NO: 235)
CTCAGGGTCAGATTCGTGTACGATTTCGTTTTAATGTACCCTTTTCTTCCAGCATCCTTGTTTGCTACTCGGCGA
GACAGTTACAACAAACCGGGAAGCGATCAGGTACGCGAGCTGGTCACGACTCACAGTCCCAGAGCTCGCCGACTC
CGAACGCCCCCAGGTGGCCCAAGCACTCTGCAGCAAAAGCCGCCAGCTAGGACGTACCATTCGAAATTGTAGGGA
AAGAAAGGCTTTGCATAACCAAATACTCTGTGTTTATAAGGTCCCTCCTCTTTCGTTTCCTAACCGCAAATTCCA
TCACACCCAATAAAGTGAGAAATAGGATTGTAAATAAGACGGAGCAAGTAGGTTCCACTTCCTCCCCGATCGTGA
TCGTGGCATTGGTACTTTCTCTTCTCAATTCCCTCTCAATAATGGTACGGCTAGCGGAGGGGGGAATAGAGGGCC
CTGGGAAGGCCTCAGGGCTCGGCGGCTAGTACCAGTGCAGAAACATCCCTCCTGCCGCAGCTTTGTGGTACCACC
CGCTGCCCGCTGATTGGCTGCCGGGGTCCCGCAGTCCGCCTCAGCCCGCCGCGCCGCCCTCAGTACAGCTCCGGC
CGCCGCGCCGCCTGGC
>TAF153_Bidirectional_Promoter (SEQ ID NO: 236)
CTCAGGGTCAGATTCGTGTACGATTTCGTTTTAATGTACCCTTTTCTTCCAGCATCCTTGTTTGCTACTCGGCGA
GACAGTTACAACAAACCGGGAAGCGATCAGGTACGCGAGCTGGTCACGACTCACAGTCCCAGAGCTCGCCGACTC
CGAACGCCCCCAGGTGGCCCAAGCACTCTGCAGCAAAAGCCGCCAGCTAGGACGTACCATTCGAAATTGTAGGGA
AAGAAAGGCTTTGCATAACCAAATACTCTGTGTTTATAAGGTCCCTCCTCTTTCGTTTCCTAACCGCAAATTCCA
TCACACCCAATAAAGTGAGAAATAGGATTGTAAATAAGACGGAGCAAGTAGGTTCCACTTCCTCCCCGATCGTGA
TCGTGGCATTGGTACTTTCTCTTCTCAATTCCCTCTCAATAATGGTACGGCTAGCGGAGGGGGGAATAGAGGGCC
CTGGGAAGGCCTCAGGGCTCGGCGGCTAGTACCAGTGCAGAAACATCCCTCCTGCCGCAGCTTTGTGGTACCACC
CGCTGCCCGCTGATTGGCTGCCGGGGTCCCGCAGTCCGCCTCAGCCCGCCGCGCCGCCCTCAGTACAGCTCCGGC
CGCCGCGCCGCCTGGCTTTCGTATTCGTTGTTCTCGGCGGGCTGTGGGGCCTCCGCGCCGCGGCCGTTAGTC
>TBL31_Bidirectional_Promoter (SEQ ID NO: 237)
CGAAGCACCCTCACAGCTCACGGCCCTCCCTCCAGGCCGGAAACGTCTCCGCCCGCTTCCGCTTCCCGATGCAGC
CGCCACTGCCCGAAGCAAAGATGGCGCCAAGTGCGCGGCGCCGGCGGGGACGTCACAGTGGTCGCGCGCGGTGAC
GCCATCGCAGCGCGCC
>TBL32_Bidirectional_Promoter (SEQ ID NO: 238)
CGAAGCACCCTCACAGCTCACGGCCCTCCCTCCAGGCCGGAAACGTCTCCGCCCGCTTCCGCTTCCCGATGCAGC
CGCCACTGCCCGAAGCAAAGATGGCGCCAAGTGCGCGGCGCCGGCGGGGACGTCACAGTGGTCGCGCGCGGTGAC
GCCATCGCAGCGCGCCGGGAGTGTGGCGTTCTGTGAAGAGTTCGGTGCTAACCTCCCTCACGCGGCGGTGGCTGC
CGGGACCCTAGCAGGTTTCAGCTGGAGCGGCGGCGGCGGCAAC
>ZFY1_Bidirectional_Promoter (SEQ ID NO: 239)
TTTTTTTAAAGCCAACAAAGGAGACAGTGGGGAATGCTATATGTCTGTATCTGCTTTCCTCCTCAACCCTAGGAA
TAAAGTAAACACGTTTACTGAGGGCGGGGGTCTAAGGGCCTGCAACAATGAGATCTGTCGCCTTGGCTAGGACTG
GCGCCGAGAGGCGATAGGTCTCGGGAGAGCCTGGCGCAGGGTGTGGGAGATTAGGAATCCCAGGTCCACCGGAGA
TGGCAGGGGGTGGCCTGGCCCGGTGCGGGGCCGCTTGCCTGCACGCAACCAACTAAGGCGGTGGTGCGCAAGT
>ZFY2_Bidirectional_Promoter (SEQ ID NO: 240)
TTTTTTTAAAGCCAACAAAGGAGACAGTGGGGAATGCTATATGTCTGTATCTGCTTTCCTCCTCAACCCTAGGAA
TAAAGTAAACACGTTTACTGAGGGCGGGGGTCTAAGGGCCTGCAACAATGAGATCTGTCGCCTTGGCTAGGACTG
GCGCCGAGAGGCGATAGGTCTCGGGAGAGCCTGGCGCAGGGTGTGGGAGATTAGGAATCCCAGGTCCACCGGAGA
TGGCAGGGGGTGGCCTGGCCCGGTGCGGGGCCGCTTGCCTGCACGCAACCAACTAAGGCGGTGGTGCGCAAGTAG
TGGTGACGGCGGGCGCGCGGAGAAAAGGAACGTTGTGACGGAAACTCCAGCTGCCGGAGACCCCACCGCAGTGAG
GTCACTGGACTCCCCGGACTCGGGGCGTGACCGGCGCCGACCCGGGGCGCCGAGAGGCCCACCGGGCGGAGGGGG
CCCAACTACCATCCCGCATTTTCCTGGGTCTCTCTCCCGGGCGGTGACGTGACGTGCTGACGGCGGGCCCGTGCC
GGGGAGCTGGGCCGCTTTTTGTCAGCTCCGAACTCGGCCCCTCCTCCCTCCCTCCGCCCGCCCTACCAGCCGGAG
CCCGGCCCAGTGCTCCAGAGAAAGGCCGTCCTGCAGCACCCGCCGCTGTCGCCGACCGCCCGCACATCCGTCGGG
TGAGTCCCGCGTGCCCCCGCGGCCGCGGG
>SRP-RPS29 (SEQ ID NO: 241)
CTTGCTCTCAGCAGTGCAACGAGGTAAAAGGAAGAAGCTGGCCCACGCATGCGCTCTTCAAATTTTTGAGACAGT
TTACCCAGAATGCAGTGCTCAAAGGAAACGCGTGCGCAGTGTGGTCAGGTTGTTTCGCTGGGTGAGTAAAATGAA
ATCTTAGAGGCGTTGTGGGCTGGCCCAGTTGATGACGTCACCATACCACAGCTTCTAGTGCTATTCTGCGCCGGT
ATCCGACC
>7sk1_Bidirectional_Promoter (SEQ ID NO: 242)
GAGGTACCCAAGCGGCGCACAAGCTATATAAACCTGAAGGAAGTCTCAACTTTACACTTAGGTCAAGTTGCTTAT
CGTACTAGAGCTTCAGCAGGAAATTTAACTAAAATCTAATTTAACCAGCATAGCAAATATCATTTATTCCCAAAA
TGCTAAAGTTTGAGATAAACGGACTTGATTTCCGGCTGTTTTGACACTATCCAGAATGCCTTGCAGATGGGTGGG
GCATGCTAAATACT
>7Sk2_Bidirectional_Promoter (SEQ ID NO: 243)
GAGGTACCCAAGCGGCGCACAAGCTATATAAACCTGAAGGAAGTCTCAACTTTACACTTAGGTCAAGTTGCTTAT
CGTACTAGAGCTTCAGCAGGAAATTTAACTAAAATCTAATTTAACCAGCATAGCAAATATCATTTATTCCCAAAA
TGCTAAAGTTTGAGATAAACGGACTTGATTTCCGGCTGTTTTGACACTATCCAGAATGCCTTGCAGATGGGTGGG
GCATGCTAAATACTGCAGTCTCCATTGGTGAGGTCGTCCCGGAGCCTCGCCCAGCTCCCGCGCGCTAGAGCCGCC
TGCTGGTCTCACCCAGCCGGGACCGCTGACCTGGCGCTTTGTGCGGCTCCAGGCCTCCGAGTGGACTCCAGAAAG
CCTGAAAAGCTATC
>7sk3_Bidirectional_Promoter (SEQ ID NO: 244)
GAGGTACCCAAGCGGCGCACAAGCTATATAAACCTGAAGGAAGTCTCAACTTTACACTTAGGTCAAGTTGCTTAT
CGTACTAGAGCTTCAGCAGGAAATTTAACTAAAATCTAATTTAACCAGCATAGCAAATATCATTTATTCCCAAAA
TGCTAAAGTTTGAGATAAACGGACTTGATTTCCGGCTGTTTTGACACTATCCAGAATGCCTTGCAGATGGGTGGG
GCATGCTAAATACTGCAGTCTCCATTGGTGAGGTCGTCCCGGAGCCTCGCCCAGCTCCCGCGCGCTAGAGCCGCC
TGCTGGTCTCACCCAGCCGGGACCGCTGACCTGGCGCTTTGTGCGGCTCCAGGCCTCCGAGTGGACTCCAG
>RMRP-CCDC107 (SEQ ID NO: 245)
TGCCGGCCCACGGGTGGAGGGATCGGGCGGGCGGTGCCGAAGCGGTCCGGCATTGGCCGGCCGCCCCAACGCGCA
CGCGCACGCGAGCAGGCCGGCCGGCTCCGGGGAGGCCACGCCCACTCCCCGTAGGGCGGGGCCAGACCATATTTG
CATAAGATAGTGTCATTCTAGCTTTCCTGTATTTGTTCATTTCGTGTCTATTAGCTATTCTGCTAGCCACAATGC
CTCTGAAAGCCTATAGTCTTAGAAAGTTATGCCCGAAAACGGTTTTTTTAATCTCACGCCACCAACTTTCTCACC
CTAATCATAAAACACAATTTCTTTAGGGCTATAAAATACTACTCTGTGAAGCTGAGGACGT
>ALOXE3_Bidirectional_Promoter (SEQ ID NO: 246)
TCTTCACGAGAGCTTTACTTTTTGCTTATAAGAGGGTTCTCTATAGGAAAAGCCAGGCTTGTAGAACCGACAGAG
GATTTTATCTGTGCAGCATAGAATATTTTGGCACAGATTTGGAAGCAGCGGGTGAAGCTCGCCTGCTGCTGATTG
AGCTTTTTCTGCCTCCCGTTCTTAGAGCCCCCGCCGAGGCTGCGACGCAGGGACTGTACCATAGTAGAGGCTGGA
ACAGTGCGGCGCCGGAACCGGCCGCGCGGGGCCGCTGCGGGCTATGGGCTTCTCTGAGAGGTTCCTCCCCAGTCC
CTAGTGGCCCAGATCCCGGACACCTGGGCTCCCGCCCAGGATCCTGCAGGCCCAGGGCGGTCCTGGAGCGGAAAG
A
>CGB1_Bidirectional_Promoter (SEQ ID NO: 247)
TTGTCGGGCCCATCCTTTCTTCCCTTTGATCTTACGCAGGGTGATGGAGCCAATCACAAGAGGCTCATCCCTGAC
GTCACCCAGTCCCCAGGGCCAGTGAGGGCCCTGCGTTCCGTGGCGCCCCCTGGAGGGAGGAAGGGGAACTGCATC
TGAGAGAGAGCAGCCAATTGGGTCCGCTGACTCTGGCCAGGTTCCCGTGCCGCGTCCAACACCCCTCACTCCCTG
TCTCACTCCCCCACGGAGACTCAATTTACTTTCCATGTCCACATTCCCAGTGCTTGCGGAAGATATCCCGCTAAG
AGAGAGAC
>CGB2_Bidirectional_Promoter (SEQ ID NO: 248)
GTGTCGGGGATCTCCTTTCTTCCTTTTGACCTTACGCAGGGTGATGGAGCCAATCAGGAGAGGCTCACCCCTGAC
GTCACCCAGTCCCCAGGGCCAGTGAGGGCCCTGCGTTCCGTGGCGCCCCCTGGAGGGAGGAAGGGGAACTGTATC
TGAGAGAGAGCAGCCAATTGGGTCCGCTGACTCCGGCCGGGTTCCCGTGCCGCGTCCAACACCCCTCACTCCCTG
TCTCACTCCCCCACGGAGACTCAATTTACTTTCCATGTCCACATCCCCAGTGCTTGCGGAAGATATCCCGCTAAG
AGAGAGAC
>Med16-1_Bidirectional_Promoter (SEQ ID NO: 249)
GAATATTGAGTTCCACCACCAGCTATTTAAAGCCCCTGGAACAAATGTCTGTACACATAGGCCGACTTCTCTTAA
ATGACCTAGAGATTTAACCTCTATTTATATTAGCCCAATGTGTAATGCAACTAACGTAGTTATTGACTGGAGTTG
AGAAAGTGCTCGTTGTTCTACCAAATATAGCTACGGTGGCTGCTGGGAATTACTGGAAATGGTCGTATGCAAATA
GCCCCGGAGGCGGGGCAGAGCCTGAGCCGCACCGCCCTCCCAGAAGTCTTTGGGAGGCGGCCCCACGCCTCAGGC
GACTGGTTGTTACCGAGGAAGATGGCGGCGCCAGACCCGAGGCGCTAGGGAAGATCGCACCGCGGACGCCCGCTG
AGCTTGGCGCACGGGCCAGGAGCTGGTGACTGCCCTC
>Med16-2_Bidirectional_Promoter (SEQ ID NO: 250)
GAATATTGAGTTCCACCACCAGCTATTTAAAGCCCCTGGAACAAATGTCTGTACACATAGGCCGACTTCTCTTAA
ATGACCTAGAGATTTAACCTCTATTTATATTAGCCCAATGTGTAATGCAACTAACGTAGTTATTGACTGGAGTTG
AGAAAGTGCTCGTTGTTCTACCAAATATAGCTACGGTGGCTGCTGGGAATTACTGGAAATGGTCGTATGCAAATA
GCCCCGGAGGCGGGGCAGAGCCTGAGCCGCACCGCCCTCCCAGAAGTCTTTGGGAGGCGGCCCCACGCCTCAGGC
GACTGGTTGTTACCGAGGAAGATGGCGGCGCCAGACCCGAGGCGCTAGGGAAGATCGCACCGCGGACGCCCGCTG
AGCTTGGCGCACGGGC
>DPP9-1_Bidirectional_Promoter (SEQ ID NO: 251)
CCTGATAGGTAGCATCCTCTCCGGATATCCTTAATAGTGGGGGATCATGGGTTTGACTGAGTGATACCAAGTCAC
AGGGGGGTGTCTCTCCCTAACCCACCGGAAGATGTCGTTCATGGGGCGTTACGCACCTTAGGCCGCCGCGCCGCG
GGCTCCCCCCCAAGCGCCGCGGACGCCTTGGTACGTGCCTGGTGGTGTCCAATCCCAGGCCGCCGCCTGGGTCGC
TCAACTTCCGGGTCAAAGGTGCCTGAGCCGGCGGGTCCCCTGTGTCCGCCGCGGCTGTCGTCCCCCGCTCCCGCC
ACTTCCGGGGTCGCAGTCCCGGGCATGGAGCCGCGACCGTGAGGCGCCGCTGGACCCGGGACGACCTGCCCAGTC
CGGCCGCCGCCCCACGTCCCGGTCTGTGTCCCACGCCTGCAGCTGGAATGGAGGCTCTCTGGACCCTTTAGAAGG
CACCCCTGCCCTCCTGAGGTCAGCTGAGCGGTTA
>DPP9-2_Bidirectional_Promoter (SEQ ID NO: 252)
CCTGATAGGTAGCATCCTCTCCGGATATCCTTAATAGTGGGGGATCATGGGTTTGACTGAGTGATACCAAGTCAC
AGGGGGGTGTCTCTCCCTAACCCACCGGAAGATGTCGTTCATGGGGCGTTACGCACCTTAGGCCGCCGCGCCGCG
GGCTCCCCCCCAAGCGCCGCGGACGCCTTGGTACGTGCCTGGTGGTGTCCAATCCCAGGCCGCCGCCTGGGTCGC
TCAACTTCCGGGTCAAAGGTGCCTGAGCCGGCGGGTCCCCTGTGTCCGCCGCGGCTGTCGTCCCCCGCTCCCGCC
ACTTCCGGGGTCGCAGTCCCGGGCATGGAGCCGCGACCGTGAGGCGCCGCTGGACCCGGGACGACCTGCCCAGTC
CGGCCGCCGCCCCACGTCCCGGTCTGTGTCCCACGCCTGCAGCTGGAATGGAGGCTCTCTGGACCCTTTAGAAG
>DPP9-3_Bidirectional_Promoter (SEQ ID NO: 253)
CCTGATAGGTAGCATCCTCTCCGGATATCCTTAATAGTGGGGGATCATGGGTTTGACTGAGTGATACCAAGTCAC
AGGGGGGTGTCTCTCCCTAACCCACCGGAAGATGTCGTTCATGGGGCGTTACGCACCTTAGGCCGCCGCGCCGCG
GGCTCCCCCCCAAGCGCCGCGGACGCCTTGGTACGTGCCTGGTGGTGTCCAATCCCAGGCCGCCGCCTGGGTCGC
TCAACTTCCGGGTCAAAGGTGCCTGAGCCGGCGGGTCCCCTGTGTCCGCCGCGGCTGTCGTCCCCCGCTCCCGCC
ACTTCCGGGGTCGCAGTCCCGGGCATGGAGCCGCGACCGTGAGGCGCCGCTGGACCCGGGACGACCTGCCCAGTC
CGGCCGCCGCCCCACGTCCCG
>SNORD13_C8orf41 (SEQ ID NO: 254)
TCCTGACTGCAGCACCAGAAGGCTGGTCTCTCCCACAGAACGAGGATGGAGGCGGGGAGGGATCCGTTGAAGAGG
GAAGGAGCGATCACCCAAAGAGAACTAAAATCAAATAAAATAAAACAGAGAGATGTCTTGGAGGAGGGGGCGAGT
CTGACCGGGATAAGAATAAAGAGAAAGGGTGAACCCGGGAGGCGGAGTTTGCAGTGAGCCGAGATCGCGCCACTG
CACTCCAGCCTGGGCGACAGAGTGAGACTCCGTCTCAGTAAAAAAAAAAAAAAAAAAAAGAATAAAGAGGAAAGG
ACGCAAGAAAGGGAAAGGGGACTCTCAGGGAGTAAAAGAGTCTTACACTTTTAACAGTGACGTTAAAAGACTACT
GTTGCCTTTCTGAAGACTAAAAAGAAAAAAAACTTAAAAATTTAAAGAAATAAACTTCTGAGCCATGTCACCAAC
TTAACCACCCCCAGGTACCTGCAACGGCTCGCGCCCGCCGGTGTCTAACAGGATCCGGACCTAGCTCATATTGCT
GCCGCAAAACGCAAGGCTAGCTTCCGCCAGTACTGCCGCAACACCTTCTTATTTCACGACGTATGGTCGTAAAGC
AATAAAGATCCAGGCTCGGGAAAATGACGGAGAGGTGGAACTATAGAGAATAAATTTGCATATATAATAATCCGC
TCGCTAATTGTGTTTCTGTTTTCCTTTGCTAAGGTAGAAACAAAAGAATAATCACAGAATCTCAGTGGGACTTTG
AAAATATCCAGGATTTTATACGTGAAGAATGGATGTATCGCATTACGGTAGTCACCCTATGTGTAAATTAGTGGC
ACATACTTGGCACTCCTTAATGTCAACTATAAGATG
>THEM259_Bidirectional_Promoter (SEQ ID NO: 255)
GACTCAAGGGTTACTGTCACACCTATTTTAAGCCCTTCAATCAAATCATCTTTTGGTTAGGATAACTTATGGTCG
GTTTCATATTTAGCATAATTTCCTACAGTGGTATGTTGCAGAACAACTTTCGTGCTTACGCTTACTTTGATGTCT
TCGATCACGTAAAATCCCATATCTTATCGTAATTTTACCGCCTTATACTGGCCTCATAGCCGCGGTGGATTGTGG
GTGCCAATATGCAAAAGAGGTGGCCCAGATGCAGGCCCGCCCCCTGGAGCGGCCGAGGTAGGGGGTGAGGCCTCC
GCGGGCGCCGCTGGCATCCCAGCGTTCTCTGCGGGCGCAGGGGGGCCGCTCTTGCCCGGCGTGGCGACTCGCTAG
CGTCAGCAGCGCCGCAGCCGGACGAGAAAGCGGAAGATGGCGGCGGCGGCCGGGAGGCCGTGAGGAGAGCGGCGG
CTGCGAGGGCGGCCGATGGCGGCCGGGAGGCGCCCTCGGACACTTGCGGGTCGTTAGGGCGCGACGCTGGGAGGC
>CFTR (deltaR) (SEQ ID NO: 926)
MQRSPLEKASVVSKLFFSWTRPILRKGYRQRLELSDIYQIPSVDSADNLSEKLEREWDRELASKKNPKLINALRR
CFFWRFMFYGIFLYLGEVTKAVQPLLLGRIIASYDPDNKEERSIAIYLGIGLCLLFIVRTLLLHPAIFGLHHIGM
QMRIAMFSLIYKKTLKLSSRVLDKISIGQLVSLLSNNLNKFDEGLALAHFVWIAPLQVALLMGLIWELLQASAFC
GLGFLIVLALFQAGLGRMMMKYRDQRAGKISERLVITSEMIENIQSVKAYCWEEAMEKMIENLRQTELKLTRKAA
YVRYFNSSAFFFSGFFVVFLSVLPYALIKGIILRKIFTTISFCIVLRMAVTRQFPWAVQTWYDSLGAINKIQDEL
QKQEYKTLEYNLTTTEVVMENVTAFWEEGFGELFEKAKQNNNNRKTSNGDDSLFFSNFSLLGTPVLKDINFKIER
GQLLAVAGSTGAGKTSLLMVIMGELEPSEGKIKHSGRISFCSQFSWIMPGTIKENIIFGVSYDEYRYRSVIKACQ
LEEDISKFAEKDNIVLGEGGITLSGGQRARISLARAVYKDADLYLLDSPFGYLDVLTEKEIFESCVCKLMANKTR
ILVTSKMEHLKKADKILILHEGSSYFYGTFSELQNLQPDFSSKLMGCDSFDQFSAERRNSILTETLHRFSLEGDA
PVSWTETKKQSFKQTGEFGEKRKNSILNPINSITLQARRRQSVLNLMTHSVNQGQNIHRKTTASTRKVSLAPQAN
LTELDIYSRRLSQETGLEISEEINEEDLKECFFDDMESIPAVTTWNTYLRYITVHKSLIFVLIWCLVIFLAEVAA
SLVVLWLLGNTPLQDKGNSTHSRNNSYAVIITSTSSYYVFYIYVGVADTLLAMGFFRGLPLVHTLITVSKILHHK
MLHSVLQAPMSTLNTLKAGGILNRFSKDIAILDDLLPLTIFDFIQLLLIVIGAIAVVAVLQPYIFVATVPVIVAF
IMLRAYFLQTSQQLKQLESEGRSPIFTHLVTSLKGLWTLRAFGRQPYFETLFHKALNLHTANWFLYLSTLRWFQM
RIEMIFVIFFIAVTFISILTTGEGEGRVGIILTLAMNIMSTLQWAVNSSIDVDSLMRSVSRVFKFIDMPTEGKPT
KSTKPYKNGQLSKVMIIENSHVKKDDIWPSGGQMTVKDLTAKYTEGGNAILENISFSISPGQRVGLLGRTGSGKS
TLLSAFLRLLNTEGEIQIDGVSWDSITLQQWRKAFGVIPQKVFIFSGTFRKNLDPYEQWSDQEIWKVADEVGLRS
VIEQFPGKLDFVLVDGGCVLSHGHKQLMCLARSVLSKAKILLLDEPSAHLDPVTYQIIRRTLKQAFADCTVILCE
HRIEAMLECQQFLVIEENKVRQYDSIQKLLNERSLFRQAISPSDRVKLEPHRNSSKCKSKPQIAALKEETEEEVQ
DTRL
>ATP7B (SEQ ID NO: 927)
MPEQERQITAREGASRKILSKLSLPTRAWEPAMKKSFAFDNVGYEGGLDGLGPSSQVATSTVRILGMTCQSCVKS
IEDRISNLKGIISMKVSLEQGSATVKYVPSVVCLQQVCHQIGDMGFEASIAEGKAASWPSRSLPAQEAVVKLRVE
GMTCQSCVSSIEGKVRKLQGVVRVKVSLSNQEAVITYQPYLIQPEDLRDHVNDMGFEAAIKSKVAPLSLGPIDIE
RLQSTNPKRPLSSANQNENNSETLGHQGSHVVTLQLRIDGMHCKSCVLNIEENIGQLLGVQSIQVSLENKTAQVK
YDPSCTSPVALQRAIEALPPGNFKVSLPDGAEGSGTDHRSSSSHSPGSPPRNQVQGTCSTTLIAIAGMTCASCVH
SIEGMISQLEGVQQISVSLAEGTATVLYNPSVISPEELRAAIEDMGFEASVVSESCSTNPLGNHSAGNSMVQTTD
GTPTSVQEVAPHTGRLPANHAPDILAKSPQSTRAVAPQKCFLQIKGMTCASCVSNIERNLQKEAGVLSVLVALMA
GKAEIKYDPEVIQPLEIAQFIQDLGFEAAVMEDYAGSDGNIELTITGMTCASCVHNIESKLTRINGITYASVALA
TSKALVKFDPEIIGPRDIIKIIEEIGFHASLAQRNPNAHHLDHKMEIKQWKKSFLCSLVFGIPVMALMIYMLIPS
NEPHQSMVLDHNIIPGLSILNLIFFILCTFVQLLGGWYFYVQAYKSLRHRSANMDVLIVLATSIAYVYSLVILVV
AVAEKAERSPVTFFDTPPMLFVFIALGRWLEHLAKSKTSEALAKLMSLQATEATVVTLGEDNLIIREEQVPMELV
QRGDIVKVVPGGKFPVDGKVLEGNTMADESLITGEAMPVTKKPGSTVIAGSINAHGSVLIKATHVGNDTTLAQIV
KLVEEAQMSKAPIQQLADRFSGYFVPFIIIMSTLTLVVWIVIGFIDFGVVQRYFPNPNKHISQTEVIIRFAFQTS
ITVLCIACPCSLGLATPTAVMVGTGVAAQNGILIKGGKPLEMAHKIKTVMFDKTGTITHGVPRVMRVLLLGDVAT
LPLRKVLAVVGTAEASSEHPLGVAVTKYCKEELGTETLGYCTDFQAVPGCGIGCKVSNVEGILAHSERPLSAPAS
HLNEAGSLPAEKDAVPQTFSVLIGNREWLRRNGLTISSDVSDAMTDHEMKGQTAILVAIDGVLCGMIAIADAVKQ
EAALAVHTLQSMGVDVVLITGDNRKTARAIATQVGINKVFAEVLPSHKVAKVQELQNKGKKVAMVGDGVNDSPAL
AQADMGVAIGTGTDVAIEAADVVLIRNDLLDVVASIHLSKRTVRRIRINLVLALIYNLVGIPIAAGVEMPIGIVL
QPWMGSAAMAASSVSVVLSSLQLKCYKKPDLERYEAQAHGHMKPLTASQVSVHIGMDDRWRDSPRATPWDQVSYV
SQVSLSSLTSDKPSRHSAAADDDGDKWSLLLNGRDEEQYI
>ATP7A (SEQ ID NO: 928)
MDPSMGVNSVTISVEGMTCNSCVWTIEQQIGKVNGVHHIKVSLEEKNATIIYDPKLQTPKTLQEAIDDMGEDAVI
HNPDPLPVLTDTLFLTVTASLTLPWDHIQSTLLKTKGVTDIKIYPQKRTVAVTIIPSIVNANQIKELVPELSLDT
GTLEKKSGACEDHSMAQAGEVVLKMKVEGMTCHSCTSTIEGKIGKLQGVQRIKVSLDNQEATIVYQPHLISVEEM
KKQIEAMGFPAFVKKQPKYLKLGAIDVERLKNTPVKSSEGSQQRSPSYTNDSTATFIIDGMHCKSCVSNIESTLS
ALQYVSSIVVSLENRSAIVKYNASSVTPESLRKAIEAVSPGLYRVSITSEVESTSNSPSSSSLQKIPLNVVSQPL
TQETVINIDGMTCNSCVQSIEGVISKKPGVKSIRVSLANSNGTVEYDPLLTSPETLRGAIEDMGFDATLSDTNEP
LVVIAQPSSEMPLLTSTNEFYTKGMTPVQDKEEGKNSSKCYIQVTGMTCASCVANIERNLRREEGIYSILVALMA
GKAEVRYNPAVIQPPMIAEFIRELGFGATVIENADEGDGVLELVVRGMTCASCVHKIESSLTKHRGILYCSVALA
TNKAHIKYDPEIIGPRDIIHTIESLGFEASLVKKDRSASHLDHKREIRQWRRSFLVSLFFCIPVMGLMIYMMVMD
HHFATLHHNQNMSKEEMINLHSSMFLERQILPGLSVMNLLSFLLCVPVQFFGGWYFYIQAYKALKHKTANMDVLI
VLATTIAFAYSLIILLVAMYERAKVNPITFFDTPPMLFVFIALGRWLEHIAKGKTSEALAKLISLQATEATIVTL
DSDNILLSEEQVDVELVQRGDIIKVVPGGKFPVDGRVIEGHSMVDESLITGEAMPVAKKPGSTVIAGSINQNGSL
LICATHVGADTTLSQIVKLVEEAQTSKAPIQQFADKLSGYFVPFIVFVSIATLLVWIVIGFLNFEIVETYFPGYN
RSISRTETIIRFAFQASITVLCIACPCSLGLATPTAVMVGTGVGAQNGILIKGGEPLEMAHKVKVVVFDKTGTIT
HGTPVVNQVKVLTESNRISHHKILAIVGTAESNSEHPLGTAITKYCKQELDTETLGTCIDFQVVPGCGISCKVTN
IEGLLHKNNWNIEDNNIKNASLVQIDASNEQSSTSSSMIIDAQISNALNAQQYKVLIGNREWMIRNGLVINNDVN
DFMTEHERKGRTAVLVAVDDELCGLIAIADTVKPEAELAIHILKSMGLEVVLMTGDNSKTARSIASQVGITKVFA
EVLPSHKVAKVKQLQEEGKRVAMVGDGINDSPALAMANVGIAIGTGTDVAIEAADVVLIRNDLLDVVASIDLSRK
TVKRIRINFVFALIYNLVGIPIAAGVFMPIGLVLQPWMGSAAMAASSVSVVLSSLFLKLYRKPTYESYELPARSQ
IGQKSPSEISVHVGIDDTSRNSPKLGLLDRIVNYSRASINSLLSDKRSLNSVVTSEPDKHSLLVGDFREDDDTAL
>AGL (SEQ ID NO: 929)
MGHSKQIRILLLNEMEKLEKTLERLEQGYELQFRLGPTLQGKAVTVYTNYPFPGETFNREKFRSLDWENPTERED
DSDKYCKLNLQQSGSFQYYFLQGNEKSGGGYIVVDPILRVGADNHVLPLDCVTLQTFLAKCLGPFDEWESRLRVA
KESGYNMIHFTPLQTLGLSRSCYSLANQLELNPDFSRPNRKYTWNDVGQLVEKLKKEWNVICITDVVYNHTAANS
KWIQEHPECAYNLVNSPHLKPAWVLDRALWRFSCDVAEGKYKEKGIPALIENDHHMNSIRKIIWEDIFPKLKLWE
FFQVDVNKAVEQFRRLLTQENRRVTKSDPNQHLTIIQDPEYRRFGCTVDMNIALTTFIPHDKGPAAIEECCNWFH
KRMEELNSEKHRLINYHQEQAVNCLLGNVFYERLAGHGPKLGPVTRKHPLVTRYFTFPFEEIDFSMEESMIHLPN
KACFLMAHNGWVMGDDPLRNFAEPGSEVYLRRELICWGDSVKLRYGNKPEDCPYLWAHMKKYTEITATYFQGVRL
DNCHSTPLHVAEYMLDAARNLQPNLYVVAELFTGSEDLDNVFVTRLGISSLIREAMSAYNSHEEGRLVYRYGGEP
VGSFVQPCLRPLMPAIAHALFMDITHDNECPIVHRSAYDALPSTTIVSMACCASGSTRGYDELVPHQISVVSEER
FYTKWNPEALPSNTGEVNFQSGIIAARCAISKLHQELGAKGFIQVYVDQVDEDIVAVTRHSPSIHQSVVAVSRTA
FRNPKTSFYSKEVPQMCIPGKIEEVVLEARTIERNTKPYRKDENSINGTPDITVEIREHIQLNESKIVKQAGVAT
KGPNEYIQEIEFENLSPGSVIIFRVSLDPHAQVAVGILRNHLTQFSPHFKSGSLAVDNADPILKIPFASLASRLT
LAELNQILYRCESEEKEDGGGCYDIPNWSALKYAGLQGLMSVLAEIRPKNDLGHPFCNNLRSGDWMIDYVSNRLI
SRSGTIAEVGKWLQAMFFYLKQIPRYLIPCYFDAILIGAYTTLLDTAWKQMSSFVQNGSTFVKHLSLGSVQLCGV
GKFPSLPILSPALMDVPYRLNEITKEKEQCCVSLAAGLPHESSGIFRCWGRDTFIALRGILLITGRYVEARNIIL
AFAGTLRHGLIPNLLGEGIYARYNCRDAVWWWLQCIQDYCKMVPNGLDILKCPVSRMYPTDDSAPLPAGTLDQPL
FEVIQEAMQKHMQGIQFRERNAGPQIDRNMKDEGENITAGVDEETGFVYGGNRFNCGTWMDKMGESDRARNRGIP
ATPRDGSAVEIVGLSKSAVRWLLELSKKNIFPYHEVTVKRHGKAIKVSYDEWNRKIQDNFEKLFHVSEDPSDLNE
KHPNLVHKRGIYKDSYGASSPWCDYQLRPNFTIAMVVAPELFTTEKAWKALEIAEKKLLGPLGMKTLDPDDMVYC
GIYDNALDNDNYNLAKGFNYHQGPEWLWPIGYFLRAKLYFSRLMGPETTAKTIVLVKNVLSRHYVHLERSPWKGL
PELTNENAQYCPFSCETQAWSIATILETLYDL
>CPS1_1 (SEQ ID NO: 930)
MAEAHQAVAFQFTVTPDGVDFRLSREALKHVYLSGINSWKKRLIRIKNGILRGVYPGSPTSWLVVIMATVGSSFC
NVDISLGLVSCIQRCLPQGCGPYQTPQTRALLSMAIFSTGVWVTGIFFFRQTLKLLLCYHGWMFEMHGKTSNLTR
IWAYLESVRPLLDDEEYYRMELLAKEFQDKTAPRLQKYLVLKSWWASNYVSDWWEEYIYLRGRSPLMVNSNYYVM
DLVLIKNTDVQAARLGNIIHAMIMYRRKLDREEIKPVMALGIVPMCSYQMERMENTTRIPGKDTDVLQHLSDSRH
VAVYHKGRFFKLWLYEGARLLKPQDLEMQFQRILDDPSPPQPGEEKLAALTAGGRVEWAQARQAFFSSGKNKAAL
EAIERAAFFVALDEESYSYDPEDEASLSLYGKALLHGNCYNRWFDKSFTLISFKNGQLGLNAEHAWADAPIIGHL
WEFVLGTDSFHLGYTETGHCLGKPNPALAPPTRLQWDIPKQCQAVIESSYQVAKALADDVELYCFQFLPFGKGLI
KKCRTSPDAFVQIALQLAHFRDRGKFCLTYEASMTRMFREGRTETVRSCTSESTAFVQAMMEGSHTKADLRDLFQ
KAAKKHQNMYRLAMTGAGIDRHLFCLYLVSKYLGVSSPFLAEVLSEPWRLSTSQIPQSQIRMEDPEQHPNHLGAG
GGFGPVADDGYGVSYMIAGENTIFFHISSKFSSSETNAQRFGNHIRKALLDIADLFQVPKAYS
>CPS1_2 (SEQ ID NO: 931)
MAEAHQAVAFQFTVTPDGVDFRLSREALKHVYLSGINSWKKRLIRIKNGILRGVYPGSPTSWLVVIMATVGSSFC
NVDISLGLVSCIQRCLPQGCGPYQTPQTRALLSMAIFSTGVWVTGIFFFRQTLKLLLCYHGWMFEMHGKTSNLTR
IWAMCIRLLSSRHPMLYSFQTSLPKLPVPRVSATIQRYLESVRPLLDDEEYYRMELLAKEFQDKTAPRLQKYLVL
KSWWASNYVSDWWEEYIYLRGRSPLMVNSNYYVMDLVLIKNTDVQAARLGNIIHAMIMYRRKLDREEIKPVMALG
IVPMCSYQMERMENTTRIPGKDTDVLQHLSDSRHVAVYHKGRFFKLWLYEGARLLKPQDLEMQFQRILDDPSPPQ
PGEEKLAALTAGGRVEWAQARQAFFSSGKNKAALEAIERAAFFVALDEESYSYDPEDEASLSLYGKALLHGNCYN
RWFDKSFTLISFKNGQLGLNAEHAWADAPIIGHLWEFVLGTDSFHLGYTETGHCLGKPNPALAPPTRLQWDIPKQ
CQAVIESSYQVAKALADDVELYCFQFLPFGKGLIKKCRTSPDAFVQIALQLAHFRDRGKFCLTYEASMTRMFREG
RTETVRSCTSESTAFVQAMMEGSHTKADLRDLFQKAAKKHQNMYRLAMTGAGIDRHLFCLYLVSKYLGVSSPFLA
EVLSEPWRLSTSQIPQSQIRMFDPEQHPNHLGAGGGFGPVADDGYGVSYMIAGENTIFFHISSKFSSSETNAQRF
GNHIRKALLDIADLFQVPKAYS
>CPS1_3 (SEQ ID NO: 932)
MAEAHQAVAFQFTVTPDGVDERLSREALKHVYLSGINSWKKRLIRIKNGILRGVYPGSPTSWLVVIMATVGSSFC
NVDISLGLVSCIQRCLPQGCGPYQTPQTRALLSMAIFSTGVWVTGIFFFRQTLKLLLCYHGWMFEMHGKTSNLTR
IWAMCIRLLSSRHPMLYSFQTSLPKLPVPRVSATIQRYLESVRPLLDDEEYYRMELLAKEFQDKTAPRLQKYLVL
KSWWASNYVSDWWEEYIYLRGRSPLMVNSNYYVMDLVLIKNTDVQAARLGNIIHAMIMYRRKLDREEIKPVMALG
IVPMCSYQMERMENTTRIPGKDTDVLQHLSDSRHVAVYHKGRFFKLWLYEGARLLKPQDLEMQFQRILDDPSPPQ
PGEEKLAALTAGGRVEWAQARQAFFSSGKNKAALEAIERAAFFVALDEESYSYDPEDEASLSLYGKALLHGNCYN
RWFDKSFTLISFKNGQLGLNAEHAWADAPIIGHLWEFVLGTDSFHLGYTETGHCLGKPNPALAPPTRLQWDIPKQ
CQAVIESSYQVAKALADDVELYCFQFLPFGKGLIKKCRTSPDAFVQIALQLAHFRDRGKFCLTYEASMTRMFREG
RTETVRSCTSESTAFVQAMMEGSHTKADLRDLFQKAAKKHQNMYRLAMTGAGIDRHLFCLYLVSKYLGVSSPFLA
EVLSEPWRLSTSQIPQSQIRMEDPEQHPNHLGAGGGFGPVADDGYGVSYMIAGENTIFFHISSKFSSSETNAQRF
GNHIRKALLDIADLFQVPKAYS
>CPS1_4 (SEQ ID NO: 933)
MAEAHQAVAFQFTVTPDGVDFRLSREALKHVYLSGINSWKKRLIRIKNGILRGVYPGSPTSWLVVIMATVGSSFC
NVDISLGLVSCIQRCLPQGCGPYQTPQTRALLSMAIFSTGVWVTGIFFFRQTLKLLLCYHGWMFEMHGKTSNLTR
IWAMCIRLLSSRHPMLYSFQTSLPKLPVPRVSATIQRYLESVRPLLDDEEYYRMELLAKEFQDKTAPRLQKYLVL
KSWWASNYVSDWWEEYIYLRGRSPLMVNSNYYVMDLVLIKNTDVQAARLGNIIHAMIMYRRKLDREEIKPVMALG
IVPMCSYQMERMENTTRIPGKDTDVLQHLSDSRHVAVYHKGREFKLWLYEGARLLKPQDLEMQFQRILDDPSPPQ
PGEEKLAALTAGGRVEWAQARQAFFSSGKNKAALEAIERAAFFVALDEESYSYDPEDEASLSLYGKALLHGNCYN
RWFDKSFTLISFKNGQLGLNAEHAWADAPIIGHLWEFVLGTDSFHLGYTETGHCLGKPNPALAPPTRLQWDIPKQ
CQAVIESSYQVAKALADDVELYCFQFLPFGKGLIKKCRTSPDAFVQIALQLAHFRDRGKFCLTYEASMTRMFREG
RTETVRSCTSESTAFVQAMMEGSHTKADLRDLFQKAAKKHQNMYRLAMTGAGIDRHLFCLYLVSKYLGVSSPFLA
EVLSEPWRLSTSQIPQSQIRMFDPEQHPNHLGAGGGFGPVADDGYGVSYMIAGENTIFFHISSKFSSSETNAQRF
GNHIRKALLDIADLFQVPKAYS
>CPS1_5 (SEQ ID NO: 934)
MAEAHQAVAFQFTVTPDGVDFRLSREALKHVYLSGINSWKKRLIRIKNGILRGVYPGSPTSWLVVIMATVGSSFC
NVDISLGLVSCIQRCLPQGCGPYQTPQTRALLSMAIFSTGVWVTGIFFFRQTLKLLLCYHGWMFEMHGKTSNLTR
IWAMCIRLLSSRHPMLYSFQTSLPKLPVPRVSATIQRYLESVRPLLDDEEYYRMELLAKEFQDKTAPRLQKYLVL
KSWWASNYVSDWWEEYIYLRGRSPLMVNSNYYVMDLVLIKNTDVQAARLGNIIHAMIMYRRKLDREEIKPVMALG
IVPMCSYQMERMENTTRIPGKDTDVLQHLSDSRHVAVYHKGRFFKLWLYEGARLLKPQDLEMQFQRILDDPSPPQ
PGEEKLAALTAGGRVEWAQARQAFFSSGKNKAALEAIERAAFFVALDEESYSYDPEDEASLSLYGKALLHGNCYN
RWFDKSFTLISFKNGQLGLNAEHAWADAPIIGHLWEFVLGTDSFHLGYTETGHCLGKPNPALAPPTRLQWDIPKQ
CQAVIESSYQVAKALADDVELYCFQFLPFGKGLIKKCRTSPDAFVQIALQLAHFRDRGKFCLTYEASMTRMFREG
RTETVRSCTSESTAFVQAMMEGSHTKADLRDLFQKAAKKHQNMYRLAMTGAGIDRHLFCLYLVSKYLGVSSPFLA
EVLSEPWRLSTSQIPQSQIRMEDPEQHPNHLGAGGGFGPVADDGYGVSYMIAGENTIFFHISSKFSSSETNAQRF
GNHIRKALLDIADLFQVPKAYS
>CPS1_6 (SEQ ID NO: 935)
MAEAHQAVAFQFTVTPDGVDFRLSREALKHVYLSGINSWKKRLIRIKNGILRGVYPGSPTSWLVVIMATVGSSFC
NVDISLGLVSCIQRCLPQGCGPYQTPQTRALLSMAIFSTGVWVTGIFFFRQTLKLLLCYHGWMFEMHGKTSNLTR
IWAMCIRLLSSRHPMLYSFQTSLPKLPVPRVSATIQRYLESVRPLLDDEEYYRMELLAKEFQDKTAPRLQKYLVL
KSWWASNYVSDWWEEYIYLRGRSPLMVNSNYYVMDLVLIKNTDVQAARLGNIIHAMIMYRRKLDREEIKPVMALG
IVPMCSYQMERMENTTRIPGKDTDVLQHLSDSRHVAVYHKGRFFKLWLYEGARLLKPQDLEMQFQRILDDPSPPQ
PGEEKLAALTAGGRVEWAQARQAFFSSGKNKAALEAIERAAFFVALDEESYSYDPEDEASLSLYGKALLHGNCYN
RWFDKSFTLISFKNGQLGLNAEHAWADAPIIGHLWEFVLGTDSFHLGYTETGHCLGKPNPALAPPTRLQWDIPKQ
CQAVIESSYQVAKALADDVELYCFQFLPFGKGLIKKCRTSPDAFVQIALQLAHFRDRGKFCLTYEASMTRMFREG
RTETVRSCTSESTAFVQAMMEGSHTKADLRDLFQKAAKKHQNMYRLAMTGAGIDRHLFCLYLVSKYLGVSSPFLA
EVLSEPWRLSTSQIPQSQIRMFDPEQHPNHLGAGGGFGPVADDGYGVSYMIAGENTIFFHISSKFSSSETNAQRF
GNHIRKALLDIADLFQVPKAYS
>H1_2-H1_83 (SEQ ID NO: 936)
TGGCAAACACCGCCGGCGCAAACAGCATTTATAATGCGCTCATACCTAAAGCCACTTGTCGGTTACGGTGACTTC
CCAACAAGACATTGCGACATGCAAATACTACAGTGCGTCCCGCCCCCTGGTGTAGTTCCACGCTGGGACGCACAC
GCACTACGGTTCCCGCCTTTAGACGACTGCGCTGGCGATTCCTGGGAGAGGACTGATGACGTCAGCGTTCGGGCT
CC
>H1_2-H1_90 (SEQ ID NO: 937)
TGGCAAACACTGCCGGCTCAAACAGCATTTATAATGCGCTCATACCTAAAGCCACTTGTCGGTTACGGTGACTTC
CCAACAAGACATTGCGACATGCAAATACTGCGGTGCGTCCCGCCCCCTGGTGTAGTTCCACGCTGGGACGCACAC
GCACTACGGTTCCCGCCTTTAGACGACTGCGCCGGCGATTCCTGGGAGAGGACTGATGACGTCAGCGTTCGGGCT
CC
>H1_2-H1_92 (SEQ ID NO: 938)
TGGCAAACAACGCCGGCGCAAACAGCATTTATAATGCGCTCATACCTAAAGCCACTTGTCGGTTACGGTGACTTC
CCAACAAGACATTGCGACATGCAAATATTACAGTGCGTCCCGCCCCCTGGTGTAGTTCCACGCTAGGACGCACAC
GCACTACGGTTCCCGCCTTTAGACGACTGCGCTGGCGATTCCTGGGAGCGGACTGATGACGTCAGCGTTCGGGCT
CC
>H1_2-H1_95 (SEQ ID NO: 939)
TGGCAAAAACTGACGGCTCAAGCAGCATTTATAAGGCTCCCATACCTAAAGACATTTGTCGGTTATGGTGACTTC
CCCACAAGACATTGCGACATGCAAATACTGCGGAGCGTACCCCCTCCCCCTGGCGCAACTCCTCGCTGGGACGCA
CGCGCGCTACGTGTTCCCGCCTTTAGTGACGTCTGCGCCGGCGATTCCTGGGAGAGGGTTGATGACGTCAGCGTT
CGGGCTCC
>H1_2-H1_98 (SEQ ID NO: 940)
TGGGAAAAAGTGGCGGCTCACGCAGCATTTATAAGGCTCCCATACCTAAAGACATTTCACGGTTATGGTGACTTC
CCCACAAGACATAGCGACATGCAAATATTGCGGAGCGTACGCGCCTCCCCCTGTCCTGTGCAGGCATCTTCTCAG
CCAGGACGCACGCGCGCTGCGTGTTCCCGCCCTGAGTGACTTCTGCGCCGGCGATTTCCTGGGAGGAGGGTTGAT
GACGTCAACGTTCGGGCTCC
>H1_2-H1_104 (SEQ ID NO: 941)
TGGCAAAAACTGCCGGCTCAAGCAGCATTTATAATGCGCCCATACCTAAAGCCACTTGTCGGTTACGGTGACTTC
CCAACAAGACATTGCGACATGCAAATACTGCGGTGCGTCCCTCCCCCTGGCGTAACTCCACGCTGGGACGCACGC
GCGCTACGTGTTCCCGCCTTTACTGACGTCTGCGCCGGCGATTCCTGGGAGAGGGTTGATGACGTCAGCGTTCGG
GCTCC
>H1_2-H1_113 (SEQ ID NO: 942)
TGGGAAAAAGTGGCGGCTCACGCAGCATTTATAAGGCTCCCATACCTAAAGACATTTCACGGTTATGGTGACTTC
CCCACAAGACATTGCGACATGCAAATATTGCGGAGCGTACGCCCTCCCCCTGTCCTGTGCAGGCATCTTCTCGCC
AGGACGCACGCGCGCTGCGTGTTCCCGCCTTGAGTGACTTCTGCGCCGGCGATTTCCTGGGAGGAGGGTTGATGA
CGTCAACGTTCGGGCTCC
>H1_2-H1_188 (SEQ ID NO: 943)
TGGGAAAAAGTGGGGGCTCACGCAGCATTTATAAGGCTCCCATACCTAAAGACATTTCACGGTTATGGTGACTTC
CCCCACAATACATAGCGACATGCAAATATCATGGTCCTTCCGCGGGGCGTGCGGCCTCCCCCTGTCCCGTGCCCC
GTAGGCGTCTTCTCAGCCAGGAGACGCACGCGGCGCGCTGCGTGTTCCCGCCCTGAGTGACTTCTGGGCCGGCGA
TTTCCCTGGGAGGAGGGTTGGATGACGTCAGCATCGCCAACGTTCGGGCTCC
>H1_2-H1_189 (SEQ ID NO: 944)
TGGGAAAAAGTGGGGCTCACGCAGAATTTATAAGGCTCCCATACCTAAAGACATTTCACGGTTATGGTGACTTCC
CCCACAATACATAGCGACATGCAAATATCATGGTCCTTCCGCGGGGCGTGCGGCCTCCCCCTGTCCCGTACCCCG
CAGGCGTCTTCTCAGCCAGGAGGCGCACGCGGCGCGCTGCGCCCTGTTCCCGCCCTGAGTGACTAGGGATTCTGG
GCCCGCGATTTCCCGCTGGGAGGCGGGTTGGATGACGTCAGCATCGCCAGCGTTCGGGCTCC
>H1_2-H1_241 (SEQ ID NO: 945)
TGGGAAAAAGTGGGGGCTCACGCAGCATTTATAAGGCTCCCATACCTAAAGACATTTCACGGTTATGGTGACTTC
CCCACAATACATAGCGACATGCAAATATCGCGGGGCGTGCGGCCTCCCCCTGTCCCGTGTAGGCGTCTTCTCAGC
CAGGACGCACGCGCGCTGCGTGTTCCCGCCCTGAGTGACTTCTGGGCCGGCGATTTCCCTGGGAGGAGGGTTGAT
GACGTCATCGCCAACGTTCGGGCTCC
>H1_2-H1_301 (SEQ ID NO: 946)
TGGGAAAAAGTGGGGCTCACGCAGAATTTATAAGGCTCCCATACCTAAAGACATTTCACGGTTATGGTGACTTCC
CCCACAATACATAGCGACATGCAAATATCATGGTCCTTCCGCGGGGCGTGCGGCCTCCCCCTGTCCCGTACCCCG
CAGGCGTCTTCTCAGCCAGGAGGCGCACGCGGCGCGCTGCGCCCTGTTCCCGCCCTGAGTGACTAGGGATTCTGG
GCCCGCGATTTCCCTGGGAGGCGGGTTGGATGACGTCAGCATCGCCAGCGTTCGGGCTCC
>H1_2-H1_306 (SEQ ID NO: 947)
TGGGAAAAAGTGGGGGCTCACGCAGAATTTATAAGGCTCCCATACCTAAAGACATTTCACGGTTATGGTGACTTC
CCCCACAATACATAGCGACATGCAAATATCATGGTCCTTCCGCGGGGCGTGCGGCCTCCCCCTGTCCCGTACCCC
GTAGGCGTCTTCTCAGCCAGGAGACGCACGCGGCGCGCTGCGCCCTGTTCCCGCCCTGAGTGACTAGGGATTCTG
GGCCGGCGATTTCCCTGGGAGGCGGGTTGGATGACGTCAGCATCGCCAGCGTTCGGGCTCC
>H1_2-H1_312 (SEQ ID NO: 948)
TGGGGAAAGGTGGGCTCAAGCAGAATTTATAAGGCTCCCAAAACTAAAGACATTTTTCGGTTATGGTGACTTCCC
CCACAATACACAGCGACATGCAAATATCATGGCCCTTCCGTGGAGTGTGCCCTCCCTGCGCTCGTCCCCCGGGCC
TCTTCTCAGCCAGGAGGCGCACGGCGCGCTGCGCCTGTTCCCGCCCTGGGGACTAGGAGCGCGCCCGCGGTTCCC
GCTGGGAGGCGGGTTGGATGACGTCAGCATCGCCAGCGTTCGGACTCC
>H1_2-H1_352 (SEQ ID NO: 949)
TGGGGAGTGGGGGGCTCAGGCCGAATTTATAAGGCTCCCAAAACGGAAGACATTTTTCAGTTATGGTGACTTCCC
CCACAAGACACAGCGCTATGCAAATATCATGGCCCCTCCGTGGAGTGTGCCCTCCCCGGCCGCTTCTCAGCCAGG
AAGCGCACGGCGCGTCTGCGCCTGTTTCCCGCCCTGGGGACTAGAAAAGCGCCCGCGCATCCCGGCCGGGCCGCG
GGTTGATGACGTCAGCATCGCCAGCGCTCGAGCGCC
>H1_2-H1_370 (SEQ ID NO: 950)
TGGGGAAAGGTGGGCTCAAGCAGAATTTATAAGGCTCCCAAACCTAAAGACATTTTACGGTTATGGTGACTTCCC
CCACAACACACAGCGACATGCAAATATCATGGTCCTTCCGTGGAGTGTGCCCTCCCTGCGCTCGTCCCCCGGGCC
TCTTCTCAGCCAGGAGGCGCACGCGCGCACGCGCGCTGCGCCTGTTCCCGCCCTGGTGACTAGGAGCGCGCCCGC
GGTTCCCGCTGGGAGGCGGGTTGGATGACGTCAGCATCGCCAGCGTTTGGACTCC
>H1_2-H1_398 (SEQ ID NO: 951)
TGGGAAAAAGTGGGGCTCAAGCAGAATTTATAAGGCTCCCAAACCTAAAGACATTTTACGGTTATGGTGACTTCC
CCCACAACACACAGCGACATGCAAATATCATGGTCCTTCCGCGGGGTGTGCGGCCTCCCTGCTCTCGTCCCCCAG
GCGTCTTCTCAGCCAGGAGGCGCACGCGCGCACGCGCGCTGCGCCCTGTTCCCGCCCTGGTGACTAGGGAGCCTG
AGCCCGCGATTTCCCGCTGGGAGGCGGGTTGGATGACGTCAGCATCGCCAGCGTTTGGACTCC
>H1_2-H1_401 (SEQ ID NO: 952)
TGGGGAGTGGGGGGCTCAGGCCGAATTTATAAGGCTCCCAAAACGGAAGACATTTTTCAGTTATGGTGACTTCCC
CCACAAGACACAGCGCTATGCAAATATCATGGCCCCTCCGTGGAGTGTGCCCTGGCCCCGGCCGCTTCTCAGCCA
GGAAGCGCACGGCGCGCTGCGCCTGTTCCCGCCCTGGGGACTAGAAAAGCGCCCGCGCATCCCGCCGGGCCGCGG
GTTGGATGACGTCAGCATCGCCAGCGCTCGAGCGCC
>H1_2-H1_402 (SEQ ID NO: 953)
TGGGGAGTGGCGGCCTCAGGCGGGATTTATAAGGCTCCCAAAACCGGTGCCATTTCTCAGTGAGGGTGACTTCCC
CCACAATACACAGCGGTATGCAAATATCAGTTGCGTCAGAGTAGAGCGCGGCCTCCCCGGCCTCTCCTCAGCCAG
GAAGCGCGCGGCGCTCCTGTTTTCGTCTCCCGCCCCGGTGACGAGAGACGCGCGCGCGCACCGTAGCCGGGCCGC
GGGTTGGTGACGTAAGCGGCATCCGCTTTCGAGCGCC
>H1_14-H1_18 (SEQ ID NO: 954)
CGGCAAATAACGCGCGCAAACAGCATTTATAATGAGCTCATACCTAAAGCCACTTTACGGTTACGGTGACTTCCC
ACAAGACATTGCGGCATGCAAATATTTTAGTGCGTCCCGCCCCTGGTAGTTCCACGCTAGGACGCACACGCACTA
CGGTTCCCGCCTTTAGACTGCGCTGGCGATTCCAGCGAGCGGACTGATGACGTCAGCGTTGGGGCTCC
>H1_16-H1_17 (SEQ ID NO: 955)
CGGCGAACAACGCGCGCAAACAGCATTTATAATGCGCTCATACCTAAAGCCACTTTTCGGTTACGGTGACTTCCC
ACAAGACATTGCGGCATGCAAATATTTTAGTGCGTCCCGCCCCTGGTAGTTCCACGCTAGGACGCACACGCACTA
CGGTTCCCGCCTTTAGACTGCGCTGGCGATTCCAGCGAGCGGACTGATGACGTCAGCGTTGGGGCTCC
>H1_21-H1_27 (SEQ ID NO: 956)
CGGCAAACAACGCGCGCAAACAGCATTTATAATGAGCTCATACCTAAAGCAACTTTACGGTTACGGTGACTTCCC
ACAAGACATTGCGACATGCAAATATTTTAGTGTATCCCGCCCCTGGTAGTTCCACGCTAGGACGCACACGCACTC
CGGTTCCCGCCTTTAGACTGCGCTGGCGATTCCAGGGAGCGGGCTGATGACGTCAGTGTTCGGGCTCC
>H1_23-H1_21 (SEQ ID NO: 957)
CGGCAAACAACGCGCGCAAACAGCATTTATAATGAGCTCATACCTAAAGCAACTTTACGGTTACGGTGACTTCCC
ACAAGACATTGCGACATGCAAATATTTTAGTGTATCCCGCCCCTGGTAGTTCCACGCTAGGACGCACACGCACTC
CGGTTCCCGCCTTTAGACTGCGCTGGCGATTCCAGGGAGCGGACTGATGACGTCAGTGTTCGGGCTCC
>H1_23-H1_24 (SEQ ID NO: 958)
CGGCCAACAGCTCGCGCAAACAGCATTTATAATGAGCTCATACCTAAAGCAACTTTACGGTTACGGTGACTTCCC
ACAAGACATTGCGACATGCAAATATTTTAGTGTATCCCGCCCCTGGTAGTTCCACGCTAGGACGCACACGCACTG
CGGTTCCCGCCTTTAGACTGCGCTGGCGATTCCAGGGAGCGGACTGATGACGTCAGTGTTCGGGCTCC
>H1_25-H1_26 (SEQ ID NO: 959)
CGGCAAACAATGCGCGCAAACAGCATTTATAATGAGCTCATACCTAAAGCCACTTTACGGTTACGGTGACTTCCC
ACAAGACATTGCGATATGTAAATATTTTAGTGCATCCCGCCCCTGGTAGTTCCACGCTAGGACGCACACGCACTA
CGGTTCCCGCCTTTAGATTGCGCTGGCGATTCCAGGGAGCGGACTGATGACGTCAGCGTTCGGGCTCC
>H1_27-H1_28 (SEQ ID NO: 960)
CGGCAAACAACGCGCGCAAACAGCATTTATAATGAGCTCATACCTAAAGCAACTTTTCGGTTACGGTGACTTCCC
ACAAGCCATTGCGACATGCAAATATTTTAGTGTATCCCGCCCCTGGTAGTTCCACGCTAGGACGCACACGCACTC
CGGTTCCCGCCTTTAGACTGCGCTGGCGATTCCGGGGAGCGGGCTGATGACGTCAGTGTTCGGGCTCC
>H1_31-H1_33 (SEQ ID NO: 961)
CGGCAAACAATGCGTGCACACAGCACTTATAATGCGCTCACACCTAAAGCCACTTTTCAGTTACGGTGACTTCCC
ACAAGACATTGCGATATGCAAATATTTTAGCGCATCCCGCCCCTGGTAGTTCCACGCGAGGACGCACACGCACTA
CGGTTCCCGCCTTTAGACTGCGCTGGCGATTCCAGGGAGCGGCCTGATGACGTCAGCGTTCGGGCTCC
>H1_34-H1_32 (SEQ ID NO: 962)
CGGCAAACAATGCGTGCACACAGCATTTATAATGCGCTCACACCTAAAGCCACTTTTCAGTTACGGTGACTTCCC
ACAAGACATTGCGATATGCAAATATTTTAGCGCGTCCCGCCCCTGGTAGTTCCACGCGAGGACGCACACGCACTA
CGGTTCCCGCCTTTAGACTGCGCTGGCGATTCCAGGGAGCGGCCTGATGACGTCAGCGTTCGGGCTCC
>H1_35-H1 37 (SEQ ID NO: 963)
CGGCAAACAGTGCGCGCAAACAGCATTTATAATGCGCTCATACCTAAAGCCACTTTTCGGTTACGGTGACTTCCC
ACAAGACATTGCGACATGCAAATATTTTAGTGCGTCCCGCCCCTGGTAGTTCCACGCTAGGACGCACACGCACTA
CGGTTCCCGCCTTTAGACTGCGCTGGCGATTCCTGGGAGCGGACTGATGACGTCAGCGTTCGGGCTCC
>H1_36-H1_20 (SEQ ID NO: 964)
CGGCAAACAACGCGCGCAAACAGCATTTATAATGCGCTCATACCTAAAGCCACTTTACGGTTACGGTGACTTCCC
ACAAGACATTGCGACATGCAAATATTTTAGTGCATCCCGCCCCTGGTAGTTCCACGCTAGGACGCACACGCACTA
CGGTTCCCGCCTTTAGACTGCGCTGGCGATTCCAGGGAGCGGACTGATGACGTCAGCGTTCGGGCTCC
>H1_39-H1_22 (SEQ ID NO: 965)
CGGCAAACAACGCGCGCAAACAGCATTTATAATGAGCTCATACCTAAAGCAACTTTACGGTTACGGTGACTTCCC
ACAAGACATTGCGACATGCAAATATTTTAGTGTATCCCGCCCCTGGTAGTTCCACGCTAGGACGCACACGCACTA
CGGTTCCCGCCTTTAGACTGCGCTGGCGATTCCAGGGAGCGGACTGATGACGTCAGTGTTCGGGCTCC
>H1_39-H1_89 (SEQ ID NO: 966)
CGGCAAACAACGCGCGCAAACAGCATTTATAATGAGCTCATACCTAAAGCAACTTTACGGTTACGGTGACTTCCC
ACAAGACATTGCGACATGCAAATATTTTAGTGTATCCCGCCCCTGGTAGTTCCACGCTAGGACGCACACGCACTA
CGGTTCCCGCCTTTAGACTGCGCTGGCGATTCCAGGGAGCGGGCTGATGACGTCAGCGCCCGGGCTCC
>H1_41-H1_40 (SEQ ID NO: 967)
TGGCAAACAATCCGCGCAAACAGCATTTATAATGCGCTCATACCTAGAGCCACTTTTCGGTTACGGTGACTTCTC
ACAAGACATTGGGACATGCAAATATTACAGTGCGTCCCGCCCCTGGTTAGTTCTACGCTAGGACGCACACGCACT
ACGGTTCCCGCCTTTAGACTGCGCTGGCGGTTCCTGGGAGCGGACTGATGACGTCAGTGTTCGGGATCC
>H1_41-H1_55 (SEQ ID NO: 968)
TGGCAAACAACGCGCGCAAACAGCATTTATAATGCGCTCATACCTAGAGCCACTTTTCGGTTACGGTGACTTCTC
ACAAGACATTGGGACATGCAAATATTACAGTGCGTCCCGCCCCTGGTTAGTTCTACGCTAGGACGCACACGCACT
ACGGTTCCCGCCTTTAGACTGCGCTGGCGATTCCTGGGAGCGGACTGATGACGTCAGCGTTCGGGATCC
>H1_47-H1_41 (SEQ ID NO: 969)
TGGCAAACAACGCCGGCGCAAACAGCATTTATAATGCGCTCATACCTAGAGCCACTTTTCGGTTACGGTGACTTC
TCAACAAGACATTGGGACATGCAAATATTACAGTGCGTCCCGCCCCTGGTGTAGTTCTACGCTAGGACGCACACG
CACTACGGTTCCCGCCTTTAGACGACTGCGCTGGCGATTCCTGGGAGCGGACTGATGACGTCAGCGTTCGGGATC
C
>H1_47-H1_43 (SEQ ID NO: 970)
TGGCAAACACCGCACGCAAATAGCATTTATAATGTGCTCATACCTAGAGCCACTTTTCGGTTACGGTGACTTCTC
AAAAAGACAGTGGGACATGCAAATATTACAGTGCGTCCCGCCCCTGGTAGGTCTACGCTAGGACGCACGCGCACT
ACGGTTCCCGCCTATAGACTGCGCTGGCGATTCCTGGGAGCGGACTGATGACGTCAGCGTTCGGGATCC
>H1_47-H1_51 (SEQ ID NO: 971)
TGGCAAACAACGCCGGCGCAAACAGCATTTATAATGTGCTCATACCTAGAGCCACTTTTCGGTTACGGTGACTTC
TCAACAAGACATTGGGACATGCAAATATTACAGTGCGTCCCGCCCCTGGTGTAGTTCTACGCTAGGACGCACGCG
CACTACGGTTCCCGCCTATAGACGACTGCGCTGGCGATTCCTGGGAGCGGACTGATGACGTCAGCGTTCGGGATC
C
>H1_47-H1_94 (SEQ ID NO: 972)
TGGCAAACAACGCCGGCGCAAACAGCATTTATAATGTGCTCATACCTAGAGCCACTTTTCGGTTACGGTGACTTC
TCAAAAAGACATTGGGACATGCAAATATTACAGTGCGTCCCGCCCCTGGTGTAGTTCTACGCTAGGACGCACGCG
CACTACGGTTCCCGCCTATAGACGACTGCGCTGGCGATTCCTGGGAGCGGACTGATGACGTCAGCGTTCGGGATC
C
>H1_53-H1_57 (SEQ ID NO: 973)
TGCCAAACAACGCGCGCAAACAGCATTTATAATGCACTCATAAGTAGAGCCACTTTTCGGTTATGGTGACTTCTC
ACAAGGAATTGGGACATGCAAATATTACAGTGCGTCCCGCCCCTGGTAGTTCTGCGCTAGGACGCAGACGCACTA
CGGTTCCCGCCTTTAGACCGCGCTGGCGATTCCTGGGAGCGGACTGATGACGTCAGCGTTCGGGATCC
>H1_59-H1_54 (SEQ ID NO: 974)
TGCCAAACAACGCGCGCAAACAGCATTTATAATGCACTCATAAGTAGAGCCACTTTTCGGTTATGGTGACTTCTC
ACAAGGAATTGGGACATGCAAATATTACAGTGCGTCCCGCCCCTGGTAGTTCTGCGCTAGGACGCAGACGCACTA
CGGTTCCCGCCTTTAGACTGCGCTGGCGATTCCTGGGAGCGGACTGATGACGTCAGCGTTCGGGATCC
>H1_59-H1_60 (SEQ ID NO: 975)
TGCCAAACAACGCGCGCAAACAGCATTTATAATGCACTCATAAGTAGAGCCACTTTTCGGTTATGGTGACTTCTC
ACAAGGAATTGGGACATGCAAATATTACAGTGCGTCCCGCCCCTGGTAGTTCTACGGACGCAGACGCACTACGGT
TCCCGCCTTTAGACTGCGCTGGCGATTCCTGGGAGCGGACTGATGACGTCAGCGTTCGGGATCC
>H1_61-H1_62 (SEQ ID NO: 976)
TGGCAAACACCGCGCGCAACCAGCATTTATAATGCGCTCGTACCTAAAGGCACTTGTCGGTTACGGTGACTTCCC
ACAAGACATTGCGACATGCAAATACTACAGTGCGTCCCGCCCCTGGTAGTTCCACGCTGGGACGCACACGCAGTA
CGGTTCCCGCCTTTAGACTGCGCTGGCGATTCCTGGGAGAGGATTGATGACGTCAGCGTTCGGGCTCC
>H1_63-H1_64 (SEQ ID NO: 977)
CGGCACAAAACGCGGGCAAACAGCATTTATAATGCGCTCATACCTAAAGCCACTTTACGGTTACGGTGACTTCCC
ACAAGACATTGCGACATGCAAATATTTTAGTGCGTCCCGCCCCTGGTAGTTCCACGCTAGGACACACACGCACTA
TGCTTCCGGCCTTTAGACTGCGCCGGTGATTCCAGGGAGCGGACTGATGACGTCAGCGTTCCGGCTCC
>H1_65-H1_63 (SEQ ID NO: 978)
CGGCAAAAAACGCGGGCAAACAGCATTTATAATGCGCTCATACCTAAAGCCACTTTACGGTTACGGTGACTTCCC
ACAAGACATTGCGACATGCAAATATTTTAGTGCGTCCCGCCCCTGGTAGTTCCACGCTAGGACACACACGCACTA
TGGTTCCGGCCTTTAGACTGCGCCGGTGATTCCAGGGAGCGGACTGATGACGTCAGCGTTCGGGCTCC
>H1_66-H1_65 (SEQ ID NO: 979)
CGGCAAACAACGCGCGCAAACAGCATTTATAATGCGCTCATACCTAAAGCCACTTTACGGTTACGGTGACTTCCC
ACAAGACATTGCGACATGCAAATATTTTAGTGCGTCCCGCCCCTGGTAGTTCCACGCTAGGACGCACACGCACTA
CGGTTCCCGCCTTTAGACTGCGCTGGCGATTCCAGGGAGCGGACTGATGACGTCAGCGTTCGGGCTCC
>H1_67-H1_69 (SEQ ID NO: 980)
TGGCGAATAACACGCGCAAAGAGCATTTATAACGCGCTCAGACCTAAAGCCACTTGTCGCTTACGGTGACTTCCC
ATAAGACATTGCAATATGCAAATACTCCAGTGCGTCCCGCCCCTGGCAGTTCCACGCTGGGACGTGCACGCACTA
CGGTTCCCGCCTTTAGACTGCGCTCGCGATTCCTGGGAGAGGGCTGATGACGTCAGCGTTCGGGCTCC
>H1_70-H1_71 (SEQ ID NO: 981)
TGGCGAAAATCACGCGCAAAGAGCATTTATAACGTGCTCAGACCTAAAGCCACTTGTCGCTTACGGTGACTCCCC
ATAAGACATTGCGATATGCAAATACTGCAGTGCGTCCCGCCCCTGGCAGTTCCACGCTGGGACGTACACGTACTA
CGGTTCCCGCCTTTAGACTGCGCTCGCGATTCCTGGGAGAGGGCTGATGACGTCAGCGTTCGGGCTCC
>H1_70-H1_76 (SEQ ID NO: 982)
TGGCGAAAAACACGCGCAAAGAGCATTTATAACGTGCTCAGACCTAAAGCCACTTGTCGCTTACGGTGACTCCCC
ATAAGACATTGCGATATGCAAATACTGCAGTGCGTCCCGCCCCTGGCAGTTCCACGCTGGGACGTGCACGCACTA
CGGTTCCCGCCTTTAGACTGCGCTCGCGATTCCTGGGAGAGGGCTGATGACGTCAGCGTTCGGGCTCC
>H1_77-H1_79 (SEQ ID NO: 983)
CGGCGAAAAACACGCGCAAAGAGCGTTTATAATGCGCTCAGACCTAAAGTAACTTGTCACTTACGGTGACTTCCC
ATAAGACATTGCGATATGCAAATATTCCAGTGCGTCCCGCCCCTGGCAGTTCCACGCCGGGACGTGCACGCACTA
CGGTTCCCGCCTTTAGACTGCGCTGGCGATTCCTGGGAGAGGGCTGATGACGTCAGCGTGCGGGCTCC
>H1_77-H1_80 (SEQ ID NO: 984)
CGGCGAAAAACACGCGCAAAGAGCGTTTATAACGCGCTCAGACCTAAAGCTACTTGTCACTTACGGTGACTTCCC
ATAAGACATTGCGATATGCAAATATTCCAGTGCGTCCCGCCCCTGGCAGTTCCACGCTGGGACGTGCACGCACTA
CGGTTCCCGCCTTTAGACTGCGCTGGCGATTCCTGGGAGAGGGCTGATGACGTCAGCGTGCGGGCTCC
>H1_77-H1_81 (SEQ ID NO: 985)
CGGCGAAAAACACGCGCAAAGAGCGTTTATAACGCGCTCAGACCTAAAGCTACTTGTCACTTACGGTGACTTCCC
ATAAGACATTGCGATATGCAAATATTCCAGTGCGTCCCGCCCCTGGCAGTTCCACGCTGGGACGTGCACGCACTA
CGGTTCCCGCCTTTAGACTGCGCTGGCGATTCCTGGGAGAGGGCTGATGACGTCAGCGTTCGGGCTCC
>H1_77-H1_82 (SEQ ID NO: 986)
TGGCGAAAAACACGCGCAAAGAGCATTTATAACGCGCTCAGACCTAAAGCCACTTGTCGCTTACGGTGACTTCCC
ATAAGACATTGCGATATGCAAATATTACAGTGCGTCCCGCCCCTGGCAGTTCCACGCTGGGACGTGCACGCACTA
CGGTTCCCGCCTTTAGACTGCGCTGGCGATTCCTGGGAGAGGGCTGATGACGTCAGCGTTCGGGCTCC
>H1_82-H1_67 (SEQ ID NO: 987)
TGGCGAAAAACACGCGCAAAGAGCATTTATAACGCGCTCAGACCTAAAGCCACTTGTCGCTTACGGTGACTTCCC
ATAAGACATTGCGATATGCAAATACTACAGTGCGTCCCGCCCCTGGCAGTTCCACGCTGGGACGTGCACGCACTA
CGGTTCCCGCCTTTAGACTGCGCTCGCGATTCCTGGGAGAGGGCTGATGACGTCAGCGTTCGGGCTCC
>H1_83-H1_77 (SEQ ID NO: 988)
TGGCGAAAAACGCGCGCAAAGAGCATTTATAATGCGCTCAGACCTAAAGCCACTTGTCGCTTACGGTGACTTCCC
ATAAGACATTGCGATATGCAAATATTACAGTGCGTCCCGCCCCTGGCAGTTCCACGCTGGGACGTGCACGCACTA
CGGTTCCCGCCTTTAGACTGCGCTGGCGATTCCTGGGAGAGGGCTGATGACGTCAGCGTTCGGGCTCC
>H1_83-H1_87 (SEQ ID NO: 989)
TGGAGGAGAACGCGCGCAAAGAGCATTTATAATGCGCGCAGACCTAAAGCCACTTGTCGCTTACGGTGACTTCCC
ATAAGACATTGCGATATGCAAATATTACAGTGCGTCCCGCCCCTGGCAGTTCCACGCTGGGACGTGCACGCGCTA
CGGTTCCCGCCTTTAGACTGCGCTGGCGATTCCTGGGAGAGGGCTGATGACGTCAGCATTCGGGCTCC
>H1_95-H1_140 (SEQ ID NO: 990)
TGGCAAAAACTGAGCTCAAGCAGCATTTATAAGGCTCCCAAACCTAAAGACATTTGTCGGTTATGGTGACTTCCC
ACAACACATTGCGACATGCAAATACTGCGGAGCGTACCCCCTCCCCTGGCAACTCCTCGCTGGGACGCACGCGCG
CTACGTGTTCCCGCCTTTTGACTGCGCCGGCGATACCTGGGAGAGGGTTGATGACGTCAGCGTTCGGGCTCC
>H1_98-H1_100 (SEQ ID NO: 991)
TGGGAAAGGGTGGGCTCACGCAGCCTTTATAAGGCTCCCAAACTTAAAGACATTTCTCGGTTATGGCGACTTCCC
ACAAGACATAGCGACATGCAAATACTGCAGACCTGTGGCGCCGACCCGGTCCTGTGCAGCCATCTTTACGGCTGG
GACGCACGCGCGCTGCGTGTTCCCGCCCTGTGACTGCGCCGGCGATTACTGGGAGAGGATTGATGACGTCAACGT
TCGGGTTCC
>H1_100-H1_101 (SEQ ID NO: 992)
TGAGAGAGGGTGGGCTCACGCCACCTTTATAAGGCTCCCAAACTTAAAGACATTTCTCGGTTATGGCGACTTCCC
ACAACACATAGCGACATGCAAATACTGCAGACCTGTGGCGCCGACCCGGTCCTGTGCAGCCATCTTTACGGCTGG
GACGCACGCGCGCTGCGTGTTCCCGCCCTGTGACTGCGCCGGCGATTACTGGGAGAGGATTGATGACGTCAACGT
TCGGGTTCC
>H1_109-H1_107 (SEQ ID NO: 993)
CGTAGGAAAACTGCTTCTGTGAGCACTTATAAAACTCCCATAAGTAGAGAGATTTCATAGTTATGGTGACTTCCC
ATAAGACATTGCGACATGCAAATATTGTGGCGCGTTCGTCCCCGTCCGGTGCAGGCAGCTTCGCTCCAGGACGCA
CGCGCAATACATGTTCCCGCCTTGAGACTGCGCCGGCAGATTCCTAGGAAGTGGTTGATGACGTCGATGTTAGGG
ATCC
>H1_111-H1_109 (SEQ ID NO: 994)
CGTAGGAAAACTGCTTCTGTGAGCACTTATAAAACTCCCATAAGTAGAGAGATTTCATAGTTATGGTGACTTCCC
ATAAGACATTGCGACATGCAAATATTGTGGCGCGTTCGTCCCCGTCCGGTGCAGGCAGCTTCGCTCCAGGACGCA
CGCGCAATACATGTTCCCGCCTTGAGACTGCGCCGGCCGATTCCTAGGAAGTGGTTGATGACGTCGATGTTGGGG
CTCC
>H1_112-H1_111 (SEQ ID NO: 995)
CGTAGGAAAACTGCTTCTGTGAGCACTTATAAAACTCCCATAAGTAGAGAGATTTCATAGTTATGGTGACTTCCC
ATAAGACATTGCGACATGCAAATATTGTGGCGCGTTCGTCCCCGTCCGGTGCAGGCAGCTTCGCTCCAGGACGCA
CGCGCACTACATGTTCCCGCCTTGAGACTGCGCCGGCCGATTCCTAGGAAGTGGTTGATGACGTCGATGTTGGGG
CTCC
>H1_113-H1_112 (SEQ ID NO: 996)
CGGAGAAAACCTGCTTCACCGAGCATTTATAAAGCTCCCATACTTAAAGAGATTTCATAGTTATGGTGACTTCCC
ACAAGACATTGCGACATGCAAATATTGTGGAGCGTACTTCCCCGTCCTGTGCAGGCAGCTTCCCGCCAGGACGCA
CGCGCGCTGCGTGTTCCCGCCTTGAGACTGCGCCGGCGATTTCCTAGGAGGGTGGTTGATGACGTCAATGTTCGG
GCTCC
>H1_114-H1_121 (SEQ ID NO: 997)
TGCCGAAAGTTTAGCTCAACCTGCATTTATAAGGCTCCCAAACCTAAAGACATTTGTCGGTTATGGTGACTTCCC
GCAACACATTGCGACATGCAAATACTGCGGAGCGTACCTCCCCTGGCAACTCCTCGCTGGGACGCACGCGCGCTG
CGTGCTCCCGCCTTTTGACTGCGCCGGCGATACTTGGGAGAGGGTTGATGACGTCAGCGTTCTGGCTCC
>H1_117-H1_115 (SEQ ID NO: 998)
TGCCGAAAGTTTAGCTCAACCTGCATTTATAAAGCTCCCAAACCTAAAGACATTTGTCGGTTATGGTGACTTCCC
GCAACACATTGCGACATGCAAATACTGCGGAGTGCACCTCCCCTGGCAACTCCTCGCTGGGACGCACGCGCGCTG
CGTGCTCCCGCCTTTTGACTGCGCCGGCGATACTTGGGAGAGGGTTGATGACGTCAGCGTTCTGGCTCC
>H1_118-H1_114 (SEQ ID NO: 999)
TGCCGAAAGTTTAGCTCAACCTGCATTTATAAGGCTCCCAAACCTAAAGACATTTGTCGGTTATGGTGACTTCCC
GCAACACATTGCGACATGCAAATACTGCGGAGCGTACCCCCTCCCCTGGCAACTCCTCGCTGGGACGCACGCGCG
CTGCGTGCTCCCGCCTTTTGACTGCGCCGGCGATACTTGGGAGAGGGTTGATGACGTCAGCGTTCTGGCTCC
>H1_118-H1_122 (SEQ ID NO: 1000)
TGCCGAAAGTTTAGCTCAACCTGCATTTATAAGGCTCCCAAACCTAAAGACATTTGTCGGTTATGGTGACTTCCC
GCAACACATTGCGACATGCAAATACTGCGGAGTGCACCCCCTCCCCTGGCAACTCCTCGCTGGGACGCACGCGCG
CTGCGTGCTCCCGCCTTTTGACTGCGCCGGCGATACTTGGGAGAGGGTTGATGACGTCAGCGTTCTGGCTCC
>H1_118-H1_123 (SEQ ID NO: 1001)
TGCCGAAAATTTAGCTCAAGCCGCATTTATAAGGCTCCCAAACCTAAATACATTTGTCGGTTATGGTGACTTCCC
GCAACACATTGCGACATGCAAATACTGCGGAGCGTACCCCCTCCCCTGGCAACTCCTCGCTGGGACGCACGCGCG
CTACGTGCTCCCGCCTTTTGACTGCGCCGGCGATACTTGGGAGAGGGTTGATGACGTCAGCGTTCTGGCTCC
>H1_124-H1_126 (SEQ ID NO: 1002)
CGCCGAAAACCAGGCTCAAGCCACATTTATAAGGCTCCCAAAGCGAAATACATTTGTCGGTTATGGTGACTTCCC
GCAACACATTGCGACATGCAAATACTGCGGAGCGTTCCTCCCCTGGCAACTCCTCGCTGGGACGCACGCGCACTA
CGTGCTCCCGCCTTTTGACTGCGCCGGCGATACTTGGGAGAGAGTTGATGACGTCAGCGTTCTGGCTCC
>H1_124-H1_129 (SEQ ID NO: 1003)
CGCCGAAAACCAGGCTCAAGCCACATTTATAAGGCTCCCAAACCGAAATACATTTGTCGGTTATGGTGACTTCCC
GCAACACATTGCGACATGCAAATACTGCGGAGCGTTCCTCCCCTGGCAACTCCTCGCTGGGACGCACGCGCACTA
CGTGCTCCCGCCTTTTGACTGCGCCGGCGATACTTGGGAGAGGGTTGATGACGTCAGCGTTCTGGCTCC
>H1_129-H1_127 (SEQ ID NO: 1004)
CGCCGAAAACCAGGCTCAAGCCACATTTATAAGGCTCGCAAACCGAAATACATTTGTCGGTTATGGTGACTTCCC
GCAACACATTGCGACATGCAAATACTGCGGAGCGTTCCTCCCCTGGCAACTCCTCGCTGGGACGCACGCGCACTA
CGTGCTCCCGCCTTTTGACTGCGCCGGCGATACTTGGGAGAGGGTTGATGACGTCAGCGTTCTGGCTCC
>H1_133-H1_132 (SEQ ID NO: 1005)
CGCCGAAAACCAGGCTCAAGCCACATTTATAAGGCTCCCAAACCTAAGTACATTTGTCGGTTATGGTGACTTCCC
GCAACACATTGCGACATGCAAATACTGCGGAGCGTCCCTCCCCTGGCAACTCCTCGCTGGGACGCACGCGCGCTA
CGTGCTCCCGCCTTTTGACTGCGCCGGCGATACTTGGGAGAGGGTTGATGACGTCAGCGTTCTGGCTCC
>H1_134-H1_133 (SEQ ID NO: 1006)
CGCCGAAAACCAGGCTCAAGCCACATTTATAAGGCTCCCAAACCTAAGTACATTTGTCGGTTATGGTGACTTCCC
GCAACACATTGCGACATGCAAATACTGCGGAGCGTTCCTCCCCTGGCAACTCCTCGCTGGGACGCACGCGCGCTA
CGTGCTCCCGCCTTTTGACTGCGCCGGCGATACTTGGGAGAGGGTTGATGACGTCAGCGTTCTGGCTCC
>H1_135-H1_134 (SEQ ID NO: 1007)
CGCCGAAAACCAGGCTCAAGCCACATTTATAAGGCTCCCAAACCTAAATACATTTGTCGGTTATGGTGACTTCCC
GCAACACATTGCGACATGCAAATACTGCGGAGCGTTCCTCCCCTGGCAACTCCTCGCTGGGACGCACGCGCGCTA
CGTGCTCCCGCCTTTTGACTGCGCCGGCGATACTTGGGAGAGGGTTGATGACGTCAGCGTTCTGGCTCC
>H1_136-H1_137 (SEQ ID NO: 1008)
TGCCGAAAACCTAGCTCAAGCCACATTTATAAGGCTCCCAAACCTAAATACATTTGTCGGTTATGGTGACTTCCC
GCAACACATTGCGACATGCAAATACTGCGGAGCGTACCTCCCCTGGCAACTCCTCGCTGGGACGCACGCGCGCTA
CGTGCTCCCGCCTTTTGACTGCGCCGGCGATACTTGGGAGAGGGTTGATGACGTCAGCGTTCTGGCTCC
>H1_137-H1_124 (SEQ ID NO: 1009)
CGCCGAAAACCAGGCTCAAGCCACATTTATAAGGCTCCCAAACCTAAATACATTTGTCGGTTATGGTGACTTCCC
GCAACACATTGCGACATGCAAATACTGCGGAGCGTACCTCCCCTGGCAACTCCTCGCTGGGACGCACGCGCGCTA
CGTGCTCCCGCCTTTTGACTGCGCCGGCGATACTTGGGAGAGGGTTGATGACGTCAGCGTTCTGGCTCC
>H1_137-H1_138 (SEQ ID NO: 1100)
CGCCGAAAGCCAGGCTCAAGCCACATTTATAAGGCTCCCAAACCTAAATACATTTGTCGGTTATGGTGACTTCCC
GCAACACATTGCGACATGCAAATACTGCGGAGCGTACCTCCCCTGGCAACTCCTCGCTGGGACGCACGCGCGCTA
CGTGCTCCCGCCTTTTGACTGCGCCGGCGACACTTGGGAGAGGGTTGATGACGTCAGCGTTCTGGCTCC
>H1_140-H1_141 (SEQ ID NO: 1101)
TGGCAAAAACTGAGCTCAAGCCGCATTTATAAGGCTCCCAAACCTAAAGACATTTGTCGGTTATGGTGACTTCCC
GCAACACATTGCGACATGCAAATACTGCGGAGCGTACCCCCTCCCCTGGCAACTCCTCGCTGGGACGCACGCGCG
CTACGTGCTCCCGCCTTTTGACTGCGCCGGCGATACTTGGGAGAGGGTTGATGACGTCAGCGTTCTGGCTCC
>H1_141-H1_118 (SEQ ID NO: 1102)
TGCCGAAAACTTAGCTCAAGCCGCATTTATAAGGCTCCCAAACCTAAATACATTTGTCGGTTATGGTGACTTCCC
GCAACACATTGCGACATGCAAATACTGCGGAGCGTACCCCCTCCCCTGGCAACTCCTCGCTGGGACGCACGCGCG
CTACGTGCTCCCGCCTTTTGACTGCGCCGGCGATACTTGGGAGAGGGTTGATGACGTCAGCGTTCTGGCTCC
>H1_141-H1_139 (SEQ ID NO: 1103)
TGCCGAAAACTTAGCTCACGCCGCACTTATAAGGCTCCCAAACCTAAATACATTTGTAGGTTATGGTGACTTCCC
GCAACACATTGCGACATGCAAATACTGCGGAGCGTACCTCCCCTGGCAACTCCTCGCTGGGACGCACGCGCGCTA
CGTGCTCCCGCCTTTTGACTGAGCCGGCGATACTTGGGAGAGGGTTGATGACGTCAGCGTTCTGGCTCC
>H1_141-H1_142 (SEQ ID NO: 1104)
TGCCGAAAGCTTACCTTCGCCCGCCTTATAAGGCTCCCAAACCTAAATACATTTGTAGGTTATGGTGACTTCCCG
CAACACATTGCGACATGCAAATACTGCGGAGCGTACCTCCCCTGGAAACTCCTCGCTGGGACGCACGCGCGTTAC
GTGCTCCCGCCTTTTGACTGAGCCGGCGATACTTGGGAGAGGGTTGATGACGTCAGCGTTCTGGCTCC
>H1_150-H1_146 (SEQ ID NO: 1105)
TGGGAAAGGGTGGCCCCGCCGAGCATTTATAAGACTCCCATACCTAAAGACATTTCTCAGTTATGGTGATTTCCC
TACAACACACAGCAACATGCAAATATCGAGGGGTGTACCGCCCCTGTCCTTTGTAGACGTCTTCTCTCCAGGACG
CACGCGCGCTGTATTCCCGCCTTGTGACTCTAGGCGGGCGATTCCTGGGAGAGGGTTGATGACGTCCAAGTTCTG
GCTTC
>H1_151-H1_150 (SEQ ID NO: 1106)
TGGGAAAGGGTGGCCCCGCCGAGCATTTATAAGACTCCCATACCTAAAGACATTTCTCAGTTATGGTGACTTCCC
TACAACACACAGCAACATGCAAATATCGAGGGGTGTACCGCCCCTGTCCTTTGTAGACGTCTTCTCTCCAGGACG
CACGCGCGCTGTATTCCCGCCTTGTGACTCTAGGCGGGCGATTCCTGGGAGAGGGTTGATGACGTCCAAGTTCTG
GCTTC
>H1_151-H1_153 (SEQ ID NO: 1107)
TGGGAAAGGGTGGCTCCGCCGAGCATTTATAAGACTCCCATACCTAAAGACATTTCTCAGTTATGGTGACTTCCC
ACAACGCACAGCAACATGCAAATATCGAGGGGTGTACCGCCCCTGTCCTTTGTAGACGTCTTCTCTCCAGGACGC
ACGCGCGCTGTATTCCCGCCTTGTGACTAGGCGGGCGATTCCTGGGAGAGGGTTGATGACGCCCAAGTTCTGGCT
TC
>H1_151-H1_155 (SEQ ID NO: 1108)
TGGGAAAGGGTGGCCCCGCCGAGCATTTATAAGACTCCCATACCTAAAGACATTTCTCAGTTATGGTGACTTCCC
ACAACACACAGCAACATGCAAATATCGAGGGGTGTACCGCCCCTGTCCTTTGTAGACGTCTTCTCTCCAGGACGC
ACGCGCGCTGTATTCCCGCCTTGTGACTAGGCGGGCGATTCCTGGGAGAGGGTTGATGACGTCCAAGTTCTGGCT
TC
>H1_157-H1_156 (SEQ ID NO: 1109)
TGGGAAAGGGGGGCTCCGCTGAGCGTTTATAAGGCTCCCATACCTAAAGACATTTCACAGTTATGGTGACTTCCC
ACAACACACAGCAACATGCAAATACAGAGGGGTGTACCGCCCCTGTCCTTTGTAGACGTCTTCTCGCCAGGACGC
ACGCGCGCTGTGTTCCCGCCTTGTGACTCTAGGCGGGCGATTCCTGGGAGAGGGTTGATGACGTCCAAGTTCTGA
CTCC
>H1_157-H1_158 (SEQ ID NO: 1110)
TGGGAGAGGGAGGTTCCGCTGAGCGTTTATAAGGCTCCCATATCTAAAGACATTTCACAGTTATGGTGACTTCCC
ACAACACACAGCAACATGCAAATACAGAGAAGCGTACCACCCCTGTCCTTTGCAGACGTCTTCTAGCCAGGACGC
ACGCGCACTGTGTTCCCGCCTTGTGACTCGAGGCGGGCGATACCTGGGAGAGGGTTGATGACGTCCAAGTTCTGA
CTCC
>H1_157-H1_160 (SEQ ID NO: 1111)
TGGGAAAGGGTGGCTCCGCCGAGCATTTATAAGGCTCCCATACCTAAAGACATTTCTCAGTTATGGTGACTTCCC
TACAACACACAGCAACATGCAAATATCGAGGGGTGTACCGCCCCTGTCCTTTGTAGACGTCTTCTCGCCAGGACG
CACGCGCGCTGTGTTCCCGCCTTGTGACTCTAGGCGGGCGATTCCTGGGAGAGGGTTGATGACGTCCAAGTTCTG
ACTCC
>H1_160-H1_151 (SEQ ID NO: 1112)
TGGGAAAGGGTGGCTCCGCCGAGCATTTATAAGGCTCCCATACCTAAAGACATTTCTCAGTTATGGTGACTTCCC
TACAACACACAGCAACATGCAAATATCGAGGGGTGTACCGCCCCTGTCCTTTGTAGACGTCTTCTCTCCAGGACG
CACGCGCGCTGTGTTCCCGCCTTGTGACTCTAGGCGGGCGATTCCTGGGAGAGGGTTGATGACGTCCAAGTTCTG
ACTCC
>H1_160-H1_159 (SEQ ID NO: 1113)
CAGGCAAAAGCAGTTCGGCCGAGAATTTATAAGGCTCCAATACCTAAAGACATTTCTCAGTTACGGTGACTTCCC
ACAACACACAGCAACATGCAAATATCGAGAGGTGTACCGCCCCTGTCCTTTGTAGACGTCTTCTCTTCGGGACGC
ACGCGCGCTGTGTTCCCGCCTTATGACTCTAGGCGGGCGATTCCTGGGAGAGGGTTGATGACGTCCAAGTTCTGA
CTCC
>H1_160-H1_161 (SEQ ID NO: 1114)
CAGGCAAAAGCAATTCGGCCGAGAATTTATAAGGCTCCAATACCTAAAGACATTTCTCAGTTACGGTGACTTCCC
ACAACACACAGCAACATGCAAATATCGAGAGGTGTACCGCCCCTGTCCTTTGTAGACGTCTTCTCTTCGGGACGC
ACGCGCGCTGTGTTCCCGCCTTATGACTCTAGGCGGGCGATTCCTGGGAGAGGGTTGATGACGTCCAAGTTCTGA
CTCC
>H1_162-H1_157 (SEQ ID NO: 1115)
TGGGAAAAGGTGGCTCCACAGAGCATTTATAAGGCTCCCATACCTAAAGACATTTCTCAGTTATGGTGACTTCCC
TACAACACACAGCAACATGCAAATATCGAGGGGTGTACCGCCCCTGTCCTTTGTAGACGTCTTCTCGCCAGGACG
CACGCGCGCTGTGTTCCCGCCTTGTGACTCTAGGCGGGCGATTCCTGGGAGAGGGTTGATGACGTCCAAGTTCTG
ACTCC
>H1_163-H1_196 (SEQ ID NO: 1116)
TGGGAAAGGGTGGCCCCACAGAGCATTTATAAGGCTCCCATACCTAAAGACATTTCTCAGTTATGGTGACTTCCC
ACAACGCATAGCAACATGCAAATATCGCGGGGAGTACCTCCCCTGTCCCTTGTACGCGTCTTCTCAGGACGCACG
CACGCGCGCTGTGTTCCCGCCCTGTGACTCCAGGCGGGCAATTCCCGGGAGAGGGTTGCTGACGGGAACGTTCAG
GCTCC
>H1_164-H1_167 (SEQ ID NO: 1117)
TGGGAAAGGGTGGTCCTGAGGCGGATTTATAAGGCTCCCACATCTAAAGGCATTTCACAGTCATGGTGACTTCCC
ACAATACATAGCAACATGCAAATTTCGCGGGGAGTACCTCCCCTGTCCCTTGTACGCGGCTTCTCAGGACGCACG
CACGCGCTCTGTGTTCCCGCCCTGTGACTCTAGGAGGGCAATTCCTGGGACAGTGTTCTGACGGGAACGTTCAGG
CTCC
>H1_166-H1_164 (SEQ ID NO: 1118)
TGGGAAAGGGTGGTCCTGAGGCGGATTTATAAGGCTCCCATATCTAAAGGCATTTCACAGTCATGGTGACTTCCC
ACAATACATAGCAACATGCAAATTTCGCGGGGAGTACCTCCCCTGTCCCTTGTACGCGGCTTCTCAGGACGCACG
CACGCGCTCTGTGTTCCCGCCCTGTGACTCTAGGAGGGCAATTCCTGGGACAGTGTTCTGACGGGAACGTTCAGG
CTCC
>H1_169-H1_165 (SEQ ID NO: 1119)
TGGGAAAAGGTGGTCCTGGGGCGGATTTATAAGGCTCCCATATCTAAAGGCATTTCACAGTCATGGTGACTTCCC
ACAATACATAGCAACATGCAAATATCGCGGGGAGTACCTCCCCTGTCCCTTGTACGCGGCTTCTCAGGACGCACG
CACGCGCTCTGTGTTCCCGCCCTGTGACTCTAGGCGGGCAATTCCTGGGACAGTGTTCTGACGGGAACGTTCAGG
CTCC
>H1_171-H1_172 (SEQ ID NO: 1120)
TGGAAAAGAGTGGCCCCAGAGAGCATTTATAAGGCTCCCGCACCTAAATGCATTTATCAGTTATGGTGACTTCCC
ACAATACATAGCAACATGCAAATATAGCGGGGAGTACCTCCCCTGTCCCTTGTCCGTGTCTTCTCAGGACGCACG
CACGCGCGCTGTGTTCCCGCCCTGTGACTCTAAGCGGGCAATTCCTGGAAGAGGCTTGCTGACGGGAACGTTCAG
GCTCC
>H1_171-H1_173 (SEQ ID NO: 1121)
TGGGAAAGAGTGGCCCCAGAGAGCATTTATAAGGCTCCCGCACCTAAATGCATTTATCAGTTATGGTGACTTCCC
ACAATACATAGCAACATGCAAATATAGCGGGGAGTACCTCCCCTGTCCCTTGTACGTGTCTTCTCAGGACGCACG
CACGCGCGCTGTGTTCCCGCCCTGTGACTCTAAGCGGGCAATTCCTGGAAGAGGCTTGCTGACGGGAACGTTCAG
GCTCC
>H1_175-H1_176 (SEQ ID NO: 1122)
TGGGAAAGGGTGGCCCCAGAGAGCATTTATAAGGCTCCCGCACCTAAATGCATTTATCAGTTATGGTGACTTCCC
ACAATACATAGCAACATGTAAATATCGCGGGGAGTACCTCCCCTGTCCCTTGTACGTGTCTTCTCAGGACGCACG
CACGCGCGCTGTGTTCCCGCCCTGTGACTCTAGGCGGGCAATTCCTGGAAGAGGCTTGCTGACGGGAACGTTCAG
GCTCC
>H1_177-H1_171 (SEQ ID NO: 1123)
TGGGAAAGGGTGGCCCCAGAGAGCATTTATAAGGCTCCCGCACCTAAATGCATTTATCAGTTATGGTGACTTCCC
ACAATACATAGCAACATGCAAATATCGCGGGGAGTACCTCCCCTGTCCCTTGTACGTGTCTTCTCAGGACGCACG
CACGCGCGCTGTGTTCCCGCCCTGTGACTCTAGGCGGGCAATTCCTGGAAGAGGCTTGCTGACGGGAACGTTCAG
GCTCC
>H1_177-H1_178 (SEQ ID NO: 1124)
TGGGAAACGGTGGCCCCAAAGAGCACTTATAAAGCCCCCTCACCTAAATGCATTTATCAGTTATGGTGACTTCCC
ACAATACATAGCAACATGCAAATATCGCGGGGAGTACCTCCCCTGTCCCTTGTACGTGTCTTCTCAGGACGCACG
CACGCGCGCTGTGTTCCCGCCCTGTGACTCTAGGTGGACAATTCCTGGGGGAGGCTTGCTGACGGGAACGTTCCG
GCTCC
>H1_177-H1_406 (SEQ ID NO: 1125)
TGGGAAACGGTGGCCCCAAAGAGCATTTATAAAGCTCCCTCACCTAAATGCATTTATCAGTTATGGTGACTTCCC
ACAATACATAGCAACATGCAAATATCGCGGGGAGTACCTCCCCTGTCCCTTGTACGTGTCTTCTCAGGACGCACG
CACGCGCGCTGTGTTCCCGCCCTGTGACTCTAGGCGGGCAATTCCTGGAAGAGGCTTGCTGACGGGAACGTTCCG
GCTCC
>H1_181-H1_182 (SEQ ID NO: 1126)
TGGGAAAGGGTGGCCCCAGCGAGCATTTATAAGGCTCCCGCATCTAAAGACATTTTACAGTTATGGTGACTTCCC
ACAACGCGTAGCAACATGCAAATATCGCAGGGAGTACCGCCCCTGTCCCTTGTACGCGTCTTCTCAGCACGCACG
CACGCGCGCTGTGTTCCCGCCCTGTGACTCCAGGCGGGTATTTCCCGGGGCGGGTTTGCTGACAAGAACGTTCAG
GCTCC
>H1_182-H1_183 (SEQ ID NO: 1127)
TGGGAAAGGGTGGGCCCAGCGAGCATTTATAAGGCTCCCGCATCTAAAGACATTTTACAATTATGGTGACTTCCC
ACAACGCGTAGCAACATGCAAATATCGCAGGGAGTACCGCCCCTGTCCCTTGTACGCGTCTTCTCAGCACGCACG
CACGCGCGCTGTGTTCCCGCCCTGTGACTCCAGGCGGGTATTTCCCGGGGCGGGTTTGCTGACAAGAACGTTCAG
GCTCC
>H1_184-H1_185 (SEQ ID NO: 1128)
TGGGAAAGGGTGGCCCCAGAGAGCATTTATAAGGCTCCCGCACCTAAAGGCATTTAACAGTTATGGTGACTTCCC
ACAACGCGTAGCAACATGCAAATATCGCAGGGAGTACCGCCCCTGTCCCTTGTACGCATCTTCTCAGGACGCACG
CACGCGCGCTGTGTTCCCGCCCTGTGACTCCAGGCGGGCATTTCCCGGGGCGGGTTTGCTGACAGGAACGTTCAG
GCTCC
>H1_188-H1_162 (SEQ ID NO: 1129)
TGGGAAAAGGTGGCCCCACAGAGCATTTATAAGGCTCCCATACCTAAAGACATTTCTCAGTTATGGTGACTTCCC
TACAATACATAGCAACATGCAAATATCGCGGGGCGTACCTCCCCTGTCCCTTGTAGGCGTCTTCTCAGCCAGGAC
GCACGCGCGCTGTGTTCCCGCCCTGTGACTCTAGGCGGGCGATTCCTGGGAGAGGGTTGATGACGTCAACGTTCG
GGCTCC
>H1_188-H1_163 (SEQ ID NO: 1130)
TGGGAAAGGGTGGCCCCAGAGAGCATTTATAAGGCTCCCATACCTAAAGGCATTTCTCAGTTATGGTGACTTCCC
ACAACGCATAGCAACATGCAAATATCGCGGGGAGTACCTCCCCTGTCCCTTGTACGCGTCTTCTCAGGACGCACG
CACGCGCGCTGTGTTCCCGCCCTGTGACTCCAGGCGGGCAATTCCCGGGAGAGGGTTGCTGACGGGAACGTTCAG
GCTCC
>H1_188-H1_170 (SEQ ID NO: 1131)
TGGGAAAGGGTGGCCCCAGAGAGCATTTATAAGGCTCCCGCACCTAAAGGCATTTTACAGTTATGGTGACTTCCC
ACAACGCGTAGCAACATGCAAATATCGCGGGGAGTACCGCCCCTGTCCCTTGTACGCGTCTTCTCAGGACGCACG
CACGCGCGCTGTGTTCCCGCCCTGTGACTCCAGGCGGGCAATTCCCGGGGCGGGTTTGCTGACGGGAACGTTCAG
GCTCC
>H1_188-H1_177 (SEQ ID NO: 1132)
TGGGAAAGGGTGGCCCCAGAGAGCATTTATAAGGCTCCCATACCTAAAGGCATTTCTCAGTTATGGTGACTTCCC
ACAATACATAGCAACATGCAAATATCGCGGGGAGTACCTCCCCTGTCCCTTGTACGCGTCTTCTCAGGACGCACG
CACGCGCGCTGTGTTCCCGCCCTGTGACTCTAGGCGGGCAATTCCTGGGAGAGGGTTGCTGACGGGAACGTTCAG
GCTCC
>H1_188-H1_179 (SEQ ID NO: 1133)
TGGGAAAGGGTGGCCCCAGCGAGCATTTATAAGGCTCCCGCATCTAAAGACATTTTACAGTTATGGTGACTTCCC
ACAACGCGTAGCAACATGCAAATATCGCAGGGAGTACCGCCCCTGTCCCTTGTACGCGTCTTCTCAGGACGCACG
CACGCGCGCTGTGTTCCCGCCCTGTGACTCCAGGCGGGTATTTCCCGGGGCGGGTTTGCTGACAGGAACGTTCAG
GCTCC
>H1_188-H1_180 (SEQ ID NO: 1134)
TGGGAAAGGGTGGCCCCAGCGAGCATTTATAAGGCTCCCGCATCTAAAGACATTTTACAGTTATGGTGACTTCCC
ACAACGCGTAGCAACATGCAAATATCGCAGGGAGTACCGCCCCTGTCCCTTGTACGCGTCTTCTCAGCACGCACG
CACGCGCGCTGTGTTCCCGCCCTGTGACTCCAGGCGGGTATTTCCCGGGGCGGGTTTGCTGACAGGAACGTTCAG
GCTCC
>H1_188-H1_186 (SEQ ID NO: 1135)
TGGGAAAGGGTGGCCCCACCGAGCATTTATAAGGCTCCCGCATCTAAAGACATTTTACAGTTATGGTGACTTCCC
ACAACGCGTAGCAACATGCAAATATCGCGGAGAGTACCGCCCCTGTCCCATGCACGCGTCTTCTCAGCACGCACG
CACGCGCGCTGTGTTCCCGCCCTGTGACTCCAGGCGGGTATTTCCAGGGGCGGGTTTGCTGACAGGAACGTTCAG
GCTTC
>H1_188-H1_198 (SEQ ID NO: 1136)
TGGGAAAAGGTGGCCCCAGAGAGCATTTATAAGGCTCCCATACCTAAAGGCATTTCTCAGTTATGGTGACTTCCC
ACAATACATAGCAACATGCAAATATCGCGGGGAGTACCTCCCCTGTCCCTTGTACGCGTCTTCTCAGGACGCACG
CACGCGCGCTGTGTTCCCGCCCTGTGACTCTAGGCGGGCAATTCCTGGGAGAGGGTTGCTGACGGGAACGTTCAG
GCTCC
>H1_188-H1_203 (SEQ ID NO: 1137)
TGGGAAAAAGTGGGGCCTCACGCAGCATTTATAAGGCTCCCATACCTAAAGACATTTCACGGTTATGGTGACTTC
CCCCACAATACATAGCGACATGCAAATATCATGGTCCTTCCGCGGGGCGTGCCTCCCCCTGTCCCTTGGCCCGTA
GGCGTCTTCTCAGCCAGGAGACGCACGCGGCGCGCTGCGTGTTCCCGCCCTGTGACTTCTAGGCGGGCGATTCCC
TGGGAGAGGGTTGGATGACGTCAGCATCGCCAACGTTCGGGCTCC
>H1_189-H1_1 (SEQ ID NO: 1138)
TGGGAAAAGGTGGGCCCACGCAGAATTTATAAGGCTCCCATACCTAAAGACATTTTACGATTATGGTGACTTCCC
ACAATACATAGCGACATGCAAATATCGCGGGGCGTGCCTCCCCTGTCCCGTCACAGGCGTCTTCTCAGCCAGGGC
GCACGCGCGCTGCGTGTTCCCGCCCTGTGACTCTGGGCCCGCGATTCCTGGGAGCGGGTTGATGACGTCAGCGTT
CGGGCTCC
>H1_189-H1_192 (SEQ ID NO: 1139)
TGGGAAAGGGTGGACCCACCGAGCATTTATAAGGCTCCCGCATCTAAAGACATTTTACAGTTATGGTGACTTCCC
ACAACGCGTAGCAACATGCAAATATCGTGGAGAGTACCGCCCCTGTCCCATGCACGCGTCTTCTCAGCACGCACG
CACGCGCGCTGTGTTTCCCGCCCTGTGACTCCAGGCGGGTATTTCCAGGGGCGGGTTTGCTGACAGGAACGTTCA
GGCTTC
>H1_189-H1_227 (SEQ ID NO: 1140)
TGGGAAAAGGTGGGCCCACGCAGAATTTATAAGGCTCCCATACCTAAAGACATTTCACGATTATGGTGACTTCCC
ACAATACATAGCGACATGCAAATATCGCGGGGCGTGCCTCCCCCTGTCCCGTACCCCACAGGCGTCTTCTCAGCC
AGGGCGCACGCGCGCTGCGTGTTCCCGCCCTGAGTGACTAGGGATTCTGGGCCCGCGATTCCCGTGGGAGCGGGT
TGATGACGTCAGCGTTCGGGCTCC
>H1_189-H1_234 (SEQ ID NO: 1141)
TGGGAAAAGGTGGGCCCACGCAGAATTTATAAGGCTCCCATACCTAAAGACATTTCACGATTATGGTGACTTCCC
ACAATACATAGCGACATGCAAATATCGCGGGGCGTGCCTCCCCTGTCCCGTACCCCACAGGCGTCTTCTCAGCCA
GGGCGCACGCGCGCTGCGTGTTCCCGCCCTGAGTGACTAGGGATTCTGGGCCCGCGATTCCCGTGGGAGCGGGTT
GATGACGTCAGCGTTCGGGCTCC
>H1_189-H1_237 (SEQ ID NO: 1142)
TGGGAAAAGGTGGGCCCACGCAGAATTTATAAGGCTCCCATACCTAAAGACATTTTACGATTATGGTGACTTCCC
ACAATACATAGCGACATGCAAATATCGCGGGGCGTGCCTCCCCTGTCCCGTCACAGGCGTCTTCTCAGCCAGGGC
GCACGCGCGCTGCGTGTTCCCGCCCTGAGTGACTCTGGGCCCGCGATTCCCGTGGGAGCGGGTTGATGACGTCAG
CGTTCGGGCTCC
>H1_189-H1_286 (SEQ ID NO: 1143)
TGGGAAAAGGTGGGCCCACGGAGAATTTATAAGGCTCCCATACCTAAAGACATTTTACGATTATGGTGACTTCCC
ACAACACATAGCGACATGCAAATATCGCGGGGCGTGCCTCCCCTGTCCCGTACAGGCGTCTTCTCAGCCAGGGCG
CACGCGCGCTGCGTGTTCCCGCCCTGTGACTCCGGGCCCGCGATTCCTGGGAGCGGGTTGATGACGTCAGCGTTC
GGGCTCC
>H1_195-H1_184 (SEQ ID NO: 1144)
TGGGAAAGGGTGGCCCCAGAGAGCATTTATAAGGCTCCCGCACCTAAAGGCATTTTACAGTTATGGTGACTTCCC
ACAACGCGTAGCAACATGCAAATATCGCAGGGAGTACCGCCCCTGTCCCTTGTACGCGTCTTCTCAGGACGCACG
CACGCGCGCTGTGTTCCCGCCCTGTGACTCCAGGCGGGCATTTCCCGGGGCGGGTTTGCTGACAGGAACGTTCAG
GCTCC
>H1_196-H1_197 (SEQ ID NO: 1145)
TGAGAAAGGGTGGCTCCACAGAGCATTTATAAGGCTCCCATACCTAAAGACATTTCTCAGTTATGGTGACTTCCC
ACAACGCATAGCAACATGCAAATATCGCGGGGAGTACCTCCCCTGTCCCTTGTACGCGTCTTCTCAGGACGCACG
CACGCGCGCTGTGTTCCCGCCCTGTGACTCCAGGCGGGCAATTCTCGGGAGGGGGTTGCTGACGGGAACGTTCAG
GCTCC
>H1_199-H1_200 (SEQ ID NO: 1146)
TGGGGAAAAACAGCTCACGGCGGCATTTATAAGACTCACAGATCTAAAGCCATTTCACGAATAGGGTGACTTCCC
ACAATACACAGCGACATGCAAACATAGCGGGGCGTGCCTTTCCTGTACCCTGTGGGCATCTCTCCTGGACGCACG
CGCGCCGGGTGTTCCCGCGCTGTGACTCTAGGCAAGCGCTTCCTGGGAGAGAGTTGATGACGGCAGCATTCGGGC
TCC
>H1_203-H1_199 (SEQ ID NO: 1147)
TGGGGAAAAGCGGGCTCCAGGCAGCATTTATAAGACTCACATATCTAAAGACATTTCACGGTTAGGGTGACTTCC
CACAATACACAGCGACATGCAAATATCGCGGGGCGTGCCTCCCCTGTCCCTTGTGGGCATCTTCTCGCCTGGACG
CACGCGCGCCGCGTGTTCCCGCCCTGTGACTCTAGGCGGGCGATTCCTGGGAGAGGGTTGATGACGTCAACATTC
GGGCTCC
>H1_203-H1_202 (SEQ ID NO: 1148)
CGGAGCAAACAGGCCACCAGGCAGCCTTTATAAGACTCACATATCTAAAGACATTTCACAGTTAGGGTGACTTCC
CACAGTACACAGCGATATGCAAATATCGCGGAGCGTGCCTCCCCAGTCTCTGGCGGGCATCTTCTCGCCTACACG
CACGCGCGCCGCGTGTTCCCGCCCTGTGACGCTAGGCGGGCCATTCATGGGAGAGGGTTGATGACGTCAACATTC
GGACTCC
>H1_203-H1_206 (SEQ ID NO: 1149)
TGGAGAAAAGCGGGCTCCAGGCAGCATTTATAAGACTCACATATCTAAAGACATTTCACAGTTAGGGTGACTTCC
CACAATACACAGCGACATGCAAATATCGCGGAGCGTGCCTCCCCTGTCTCTTGTGGGCATCTTCTCGCCTGGACG
CACGCGCGCCGCGTGTTCCCGCCCTGTGACGCTAGGCGGGCGATTCCTGGGAGAGGGTTGATGACGTCAACATTC
GGGCTCC
>H1_203-H1_304 (SEQ ID NO: 1150)
TGGGAAAAAGAGGGGCTTCACGCAGCATTTATAAGGCTCCCATATCTAAAGACATTTCACGGTTAGGGTGACTTC
CCCCACAATACATAGCGACATGCAAATATCATGGTCCTTCCGCGGGGCGTGCCTCCCCCTGTCCCTTGGCCCGTG
GGCATCTTCTCGCCAGGAGACGCACGCGGCGCGCTGCGTGTTCCCGCCCTGTGACTTCTAGGCGGGCGATTCCCT
GGGAGAGGGTTGGATGACGTCAGCATCGCCAACATTCGGGCTCC
>H1_206-H1_207 (SEQ ID NO: 1151)
TGAAGAAAGGCGGCTCTAAGCAGCATTTATAAGACTCACATATCTGAAGACATTTCACAGTTAGGGTGACTTCCC
ACAAGACACAGCGACATGCAAATATCGCGGAATGTGCTTCCCCTGTCTCCTGTGGGCATCTTCTCGCCTGGACGC
ACGCGCACCGCGTGTTCCCGCCCTGTGACGCTAGGCGGGCGATTCCTGGGAGAGGGTTGATGACGTCAACACTCG
GGCTCC
>H1_210-H1_208 (SEQ ID NO: 1152)
TGGGAAAGGGTGGTCCCATACAGAACTTATAAGATTCCCATATCCAAAGACATTTCACGTTTATGGTGATTTCCC
AGAACACATAGCGACATGCAAATATTGCAGGGCGCCACTCCCCTGTCCCTCACAGCCATCTTCCTGCCAGGGCGC
ACGCGCGCTGGGTGTTCCCGCCTAGTGACACTGGGCCCGCGATTCCTTGGAGCGGGTTGATGACGTCAGCGTTCG
AATTCC
>H1_210-H1_209 (SEQ ID NO: 1153)
TGGGAAAGGGTGGTCCCACACAGAACTTATAAGACTCCCATATCCAAAGACATTTCACGTTTATGGTGATTTCCC
AGAACACATAGCGACATGCAAATATTGCAGGGCGCCACTCCCCTGTCCCTCACAGCCATCTTCCTGCCAGGGCGC
ACGCGCGCTGGGTGTTCCCGCCTAGTGACACTGGGCCCGCGATTCCTTGGAGCGGGTTGATGACGTCAGCGTTCG
AATTCC
>H1_210-H1_212 (SEQ ID NO: 1154)
TGGGGAAGGGTGGTCCCATACAGAACTTATAAGATTCCCATACCCAAAGACATTTCACGTTTATGGTGACTTCCC
AGAAGACATAGCGACATGCAAATATTGCAGGGCGTCACTCCCCTGTCCCTCACAGCCATCTTCCTGCCAGGGCGC
ACGCGCGCTGGGTGTTCCCGCCTAGTGACACTGGGCCCGCGATTCCTTGGAGCGGGTTGATGACGTCAGCGTTCG
AATTCC
>H1_210-H1_220 (SEQ ID NO: 1155)
TGGGGAAGGGTGGTCCCATACAGAACTTATAAGATTCCCATACCCAAAGACATTTCACGTTTATGGTGACTTCCC
AGAAGACATAGCGACATGCAAATATTGCAGGGCGTCACTCCCCCTGTCCCTCAACAGTCATCTTCCTGCCAGGGC
GCACGCGCGCTGGGTGTTCCCGCCTAGTGACACTGGGCCCGCGATTCCTTGGAGCGGGTTGATGACGTCAGCGTT
CGAATTCC
>H1_210-H1_225 (SEQ ID NO: 1156)
TGGGAAAGGGTGGTCCCATACAGAACTTATAAGATTCCCATACCCAAAGACATTTCACGTTTATGGTGACTTCCC
AGAACACATAGCGACATGCAAATATTGCAGGGCGTCACTCCCCTGTCCCTCACAGCCATCTTCCTGCCAGGGCGC
ACGCGCGCTGGGTGTTCCCGCCTAGTGACACTGGGCCCGCGATTCCTTGGAGCGGGTTGATGACGTCAGCGTTCG
AATTCC
>H1_213-H1_219 (SEQ ID NO: 1157)
TGGGGAAAGGTGGTCCCATACAGAACTTATAAGATTCCCATACTCAAAGACATTTCACGTTTATGGTGACTTCCC
AGAAGACACAGCGACATGCAAATATTGTAGGGCGTCACACCCCCTGTCCCTCACAGTCATCTTCCTGCCAGGGCG
CACGCGCGCTGGGTGTTCCCGCGTAGTGACACTGGGCCCGCGATTCCTTGGAGCGGGTTGATGACGTCAGCGTTC
GAATTCC
>H1_219-H1_218 (SEQ ID NO: 1158)
TGGGGAAAGGTGGTCCCACACAGAACTTATAAGATTCCCATACTCAAAGACATTTCTCGTTTATGGTGACTTCCC
AGAAGACACAGCGACATGCAAATATTGTAGGGCGTCACACCCCTGTCCCTCACAGTCATCTTCCTGCCAGGGCGC
ACGCGCGCTGGGTGTTCCCGCGTAGTGACACTGGGCCCGCGATTCCTTGGAGCGGGTTGATGACGTCAGCGTTCG
AATTCC
>H1_220-H1_222 (SEQ ID NO: 1159)
TGGGGAAGGGTGGTCCCATACAGAACTTATAAGATTCCCATACTCAAAGACATTTCACGTTTATGGTGACTTCCC
AGAAGACATAGCGACATGCAAATATTGCAGGGCGTCACACCCCCTGTCCCTCAACAGTCATCTTCCTGCCAGGGC
GCACGCGCGCTGGGTGTTCCCGCGTAGTGACACTGGGCCCGCGATTCCTTGGAGCGGGTTGATGACGTCAGCGTT
CGAATTCC
>H1_220-H1_223 (SEQ ID NO: 1160)
TGGGGAAGGGTGGTCCTACACAGAACTTATAAGACTCCCATACTCAAAGACATTTCACGTTTATGGTGACTTCCC
AGAAGACATAGCGACATGCAAATATTGCAGGGCGTCACACCCCCTGTCCCTTACAGCCATCTTCCTGCCAGGGCG
CACGCGCGCTGGGTGTTCCCGCGTAGTGACACTGGGCCCGCGATTCCTTGGAGCGGGTTGATGACGTCAGCGTTC
GAATTCC
>H1_220-H1_224 (SEQ ID NO: 1161)
TGGGGAAGGGTGGTCCTACACAGAACTTATAAGACTCCCATACTCAAAGACATTTCACGTTTATGGTGACTTCCC
AGAAGACATAGCGACATGCAAATATTGCAGGGCGTCACACCCCCTGTCCCTTAACAGTCATCTTCCTGCCAGGGC
GCACGCGCGCTGGGTGTTCCCGCGTAGTGACACTGGGCCCGCGATTCCTTGGAGCGGGTTGATGACGTCAGCGTT
CGAATTCC
>H1_222-H1_213 (SEQ ID NO: 1162)
TGGGGAAGGGTGGTCCCATACAGAACTTATAAGATTCCCATACTCAAAGACATTTCACGTTTATGGTGACTTCCC
AGAAGACATAGCGACATGCAAATATTGCAGGGCGTCACACCCCCTGTCCCTCACAGTCATCTTCCTGCCAGGGCG
CACGCGCGCTGGGTGTTCCCGCGTAGTGACACTGGGCCCGCGATTCCTTGGAGCGGGTTGATGACGTCAGCGTTC
GAATTCC
>H1_227-H1_210 (SEQ ID NO: 1163)
TGGGGAAGGGTGGTCCCACACAGAACTTATAAGATTCCCATACCCAAAGACATTTCACGATTATGGTGACTTCCC
AGAAGACATAGCGACATGCAAATATTGCAGGGCGTGCCTCCCCCTGTCCCTCAACAGTCGTCTTCCTGCCAGGGC
GCACGCGCGCTGGGTGTTCCCGCCTAGTGACACTGGGCCCGCGATTCCTTGGAGCGGGTTGATGACGTCAGCGTT
CGAATTCC
>H1_227-H1_226 (SEQ ID NO: 1164)
TGGGGAAGGGTGGTCCTACACAGAACTTATAAGATTCCCATACCCAAAGACATTTCACGATTATGGTGACTTCCC
AGAAGACACAGCGACATGCAAATATTGCAGGTCGTGCCTCGCCTGTCCCTCACAGTCGTCTTCCTGCCAGGGCGC
ACGCGCGCTGGGTGTCCCGCCAACTGACACTGGGCTCGCGATTCCTTGGAGCGGGTTGATGACGTCAGCGTTCGA
ATTCC
>H1_227-H1_228 (SEQ ID NO: 1165)
TGGGGAAGGGTGGTCCCACACAGAACTTATAAGATTCCCATACCCAAAGACATTTCACGATTATGGTGACTTCCC
AGAAGACACAGCGACATGCAAATATTGCAGGTCGTGCCTCGCCTGTCCCTCACAGTCGTCTTCCTGCCAGGGCGC
ACGCGCGCTGGGTTTCCCGCCAACTGACACTGGGCTCGCGATTCCTTGGAGCGGGTTGATGACGTCAGCGTTCGA
ATTCC
>H1_227-H1_230 (SEQ ID NO: 1166)
TGGGGAAGGGTGGTCCTACGCAGAACTTATAAGATTCCCATACCCAAAGACATTTCACGATTATGGTGACTTCCC
AGAATACACAGCGACATGCAAATATTGCAGGTCGTGCCTCGCCTGTCCCTCACAGTCGTCTTCCTGCCAGGGCGC
ACGCGCGCTGGGTGTCCCGCCAACTGACACTGGGCTCGCGATTCCTTGGAGCGGGTTGATGACGTCAGCGTTCGA
ATTCC
>H1_231-H1_232 (SEQ ID NO: 1167)
TGAGGAAAAATGGTTCCACACAGAATTTATAAGGTTCCCAAATCTAAAGACATTTCACCATTATGGTGATTTCCC
ACAACACATAGCGACATGCAAATATCTCAGAGCGTACCTCCCCTGTCCTATACGGGCGTCAACTCGCCAGGGCGC
ACGCGCGCTGTGTGTTTCCCGCCTGTGACTCGGGACTCTGGGCCCGCGATTCCTCGGAGCGGGTTGAGAACGTCA
GCTCCGGTGCTTC
>H1_233-H1_231 (SEQ ID NO: 1168)
TGAGGAAAAGTGGTTCCACACAGAATTTATAAGGTTCCCAAATCTAAAGACATTTCACCATTATGGTGATTTCCC
ACAACACATAGCGACATGCAAATATCTCAGAGCGTACCTCCCCTGTCCTATACGGGCGTCAACTCGCCAGGGCGC
ACGCGCGCTGTGTGTTTCCCGCCTGTGACTCGGGACTCTGGGCCCGCGATTCCTCGGAGCGGGTTGATAACGTCA
GCTCCGGTGCTTC
>H1_234-H1_235 (SEQ ID NO: 1169)
TGGGAAAAGGTGGGCCCACACAGAATTTATAAGGCTCCCATACCTAAAGACATTTCACGATTATGGTGACTTCCC
ACAATACATAGCGACATGCAAATATCGCGGGGCGTGCCTCCCCTGTCCCGTACCCCACAGGCGTCTTCTCGCCAG
GGCGCACGCGCGCTGCGTGTTCCCGCCCTGTGACTAGGGATTCTGGGCCCGCGATTCCTGGGAGCGGGTTGATGA
CGTCAGCGTTCGGGCTCC
>H1_235-H1_233 (SEQ ID NO: 1170)
TGAGGAAAAGTGGGCCCACACAGAATTTATAAGGTTCCCAAACCTAAAGACATTTCACCATTATGGTGACTTCCC
ACAATACATAGCGACATGCAAATATCTCAGGGCGTGCCTCCCCTGTCCCGTACCCCACGGGCGTCAACTCGCCAG
GGCGCACGCGCGCTGCGTGTTTCCCGCCTGTGACTCGGGACTCTGGGCCCGCGATTCCTGGGAGCGGGTTGATGA
CGTCAGCTCTGGGGCTTC
>H1_238-H1_239 (SEQ ID NO: 1171)
TGGCAGAAAGCGGCCCGCCGCCGCATTTATAAGGCTCTCCCACCTAAAGCCATATAATGGTTATGGTGACTTCCC
AGAATACATGGCAACATGCAAATATCGTGCGGTATACCTCCCCTGTCGCGCGTAGGCGTCTCCTCCCCTGGACGC
ACGGGCGCCGCATGTTCCCGCCCTATGACTCTGGGCCGGCGACTACGGGAGAGAGCTGATGACGTGACCGCGACC
GCTCGGGCTCC
>H1_241-H1_238 (SEQ ID NO: 1172)
TGGGAAAAAGCGGCCCCCCGCCGCATTTATAAGGCTCTCCCACCTAAAGACATTTAACGGTTATGGTGACTTCCC
ACAATACATAGCAACATGCAAATATCGCGCGGTATACCTCCCCTGTCGCGCGTAGGCGTCTCCTCCCCTGGACGC
ACGGGCGCTGCGTGTTCCCGCCCTGTGACTCTGGGCCGGCGACTACGGGAGAGAGCTGATGACGTGACCGCGACC
GCTCGGGCTCC
>H1_242-H1_243 (SEQ ID NO: 1173)
TGGGAAGTAAGAGATTCACGCCGGTTATATAAGATTCCTGTAACTAAAGAAATTTCAAGGATAGGGTGACTTCCC
ACAATACAAAGCGACATGCAAATATCGCGGGGCGTGCCTGTCCTGACCTTTGTGAGACTCTTCGCTAGGACGCAG
GCGTGCTGCGAGTTCCCGCCTTATCGGCGAGTCCTGGGGGAGAGTTGATGACGCCAACATTCGGGCTCC
>H1_242-H1_248 (SEQ ID NO: 1174)
TGGGAAAAAAAGGCTTCACGCAGATTATATAAGGTTCCTGTACCTAAAGACATTTCAAGGTTAGGGTGACTTCCC
ACAATACATAGCGACATGCAAATATAGCGGGGCGTGCCTCCCCTGTCCCTTGTGGGCGTCTTCTCGCTAGGACGC
ACGCGCGCTGCGTGTTCCCGCCTTGTGACTCTAGGTCGGCGAGTCCTGGGAGAGGGTTGATGACGTCAACATTCG
GGCTCC
>H1_247-H1_246 (SEQ ID NO: 1175)
TGCGTAAAATACGCTTCTCGCAGATTATATAAGGTTCCTGTACCTAAAGACATTTCAAGGGTAGGGTGACTTCCC
ACAACACATAGCGACATGCAAATATAGGGTGTGTCTCCCCTGGCCCTTGTGGGCGTCTTCTCGCTAGGACGCACG
CGCGCTGCGTTTTCCCGCCTTCTGGCTCTAGGTCGGCGAGTCCCGGGAAAGGATTGATTACGTCAACATTCGGGC
TTC
>H1_248-H1_247 (SEQ ID NO: 1176)
TGCGTAAAAAAGGCTTCACGCAGATTATATAAGGTTCCTGTACCTAAAGACATTTCAAGGTTAGGGTGACTTCCC
ACAATACATAGCGACATGCAAATATAGGGGGGTGTGTCTCCCCTGGCCCTTGTGGGCGTCTTCTCGCTAGGACGC
ACGCGCGCTGCGTTTTCCCGCCTTGTGACTCTAGGTCGGCGAGTCCTGGGAAAGGATTGATTACGTCAACATTCG
GGCTTC
>H1_248-H1_249 (SEQ ID NO: 1177)
TGCGTAAAAAAGGCTTCACGGTGACTATATAAGGTTCCTGTACCTAATGACATTTCAAGATTAGGGTGACTTCCC
ACAATACATAGCGACATGCAAATAAAGGGGGGTTTCTCGTCTGTCCCCCCTGTGGGCGTCTTCTTGCTAGGACGC
ACGCGCGCTGCGTTTTCCCGCCTTGTGATTCTGGGTCGGCAAGTCCTGGGAAAGGATTGATTACGTCAACATTCG
GGCTTC
>H1_250-H1_251 (SEQ ID NO: 1178)
TGAGAAAAAAAGGCCACACGGAGAATATATAAGGCTCCCATATCTGAAGACATTTTAAGATTAGGGTGATTTCCC
ACAATACATAGCGACATGTAAATGTAGTGGGGCATGCCTTCCCTGTCCCTTGTGGGCAGCTTCTCGCCAGGACGC
ACGCGCGCTGCGTGTTCCCGCCTTGTGACTAAATTGGCGAGTCTGGGAGGAGACTGATGATGTCAGCATCATCAA
CTTTCCCGCTCC
>H1_251-H1_252 (SEQ ID NO: 1179)
TGAGGGAAGACTGTCGTAGGGAGAATATATAAGGCTCCCATATCGCTAGACATTTTAAGATGAGGGTGATTTCCC
ACAATGCATAGCGACATGTAAATGAAGTGGGGCATGCTTTCCCTGTCCCTTGTGGGCAGCTTCTCGCCAGGACGC
ACGCGCGCTGCGTGTTCCCGCCTTGTGACTAAATTGGCGAGTCTGGGAGGAGACTGATGATGTCAGCATCATCAA
CTTTCCCGCTCC
>H1_253-H1_242 (SEQ ID NO: 1180)
TGGGAAAAAAAGGCTTCACGCAGAATATATAAGGCTCCCATATCTAAAGACATTTCAAGGTTAGGGTGACTTCCC
ACAATACATAGCGACATGCAAATATAGCGGGGCGTGCCTCCCCTGTCCCTTGTGGGCATCTTCTCGCCAGGACGC
ACGCGCGCTGCGTGTTCCCGCCTTGTGACTCTAGGCTGGCGAGTCCCTGGGAGAGGGTTGATGACGTCAGCATCG
TCAACATTCGGGCTCC
>H1_253-H1_250 (SEQ ID NO: 1181)
TGAGAAAAAAAGGCCTCACGCAGAATATATAAGGCTCCCATATCTGAAGACATTTTAAGATTAGGGTGATTTCCC
ACAATACATAGCGACATGTAAATGTAGTGGGGCATGCCTCCCCTGTCCCTTGTGGGCAGCTTCTCGCCAGGACGC
ACGCGCGCTGCGTGTTCCCGCCTTGTGACTAAATTGGCGAGTCTGGGAGGAGATTGATGATGTCAGCATCATCAA
CTTTCCCGCTCC
>H1_253-H1_255 (SEQ ID NO: 1182)
CGCGAGAAAAATTCTTCACGCAGAATATATAAGGATCCCATATCTGAAGACATTTTACGATTACGGTGATTTCCC
ACAACACATAGCGACATGTAAATGTAGTGGGGCATGCCTCCCCTGTCCCTTGTGGGCAGCTTCTCGCCAGAACGC
ACGCGCGGTGCGTGTTCCCGCCTTGTGACTAAGTTGGCGAGTCAGGGAGGAGATTGATGATGTCATCATCGTCAG
CTCACCCGCTCC
>H1_253-H1_256 (SEQ ID NO: 1183)
CGAGAGAAAAAGTCTTCACGCAGAATATATAAGGATCCCATATCTGAAGACATTTTACGATTACGGTGATTTCCC
ACAACACATAGCGACATGTAAATGTAGTGGGGCATGCCTCCCCTGTCCCTTGTGGGCAGCTTCTCGCCAGAACGC
ACGCGCGGTGCGTGTTCCCGCCTTGTGACTAAGTTGGCGAGTCAGGGAGGAGATTGATGATGTCATCATCGTCAG
CTCACCCGCTCC
>H1_253-H1_257 (SEQ ID NO: 1184)
TGAGAAAAAAAGGCCTCACGCAGAATATATAAGGCTCCCATATCTGAAGACATTTTAAGGTTAGGGTGATTTCCC
ACAATACATAGCGACATGTAAATGTAGTGGGGCATGCCTCCCCTGTCCCTTGTGGGCAGCTTCTCGCCAGGACGC
ACGCGCGCTGCGTGTTCCCGCCTTGTGACTAAATTGGCGAGTCTGGGAGGAGATTGATGACGTCAGCATCATCAA
CTTTCCCGCTCC
>H1_253-H1_258 (SEQ ID NO: 1185)
TGAGAAAAAAAGGCCTCACGCAGAATATATAAGGCTCCCATATCTGAAGACATTTTAAGGTTAGGGTGATTTCCC
ACAATACATAGCGACATGCAAATATAGTGGGGCGTGCCTCCCCTGTCCCTTGTGGGCAGCTTCTCGCCAGGACGC
ACGCGCGCTGCGTGTTCCCGCCTTGTGACTAAATTGGCGAGTCTGGGAGGGGATTGATGACGTCAGCATCATCAA
CTTTCCCGCTCC
>H1_253-H1_261 (SEQ ID NO: 1186)
TGGGAAAAAGAGGGCTTCACGCAGAATATATAAGGCTCCCATATCTAAAGACATTTCACGGTTAGGGTGACTTCC
CCCACAATACATAGCGACATGCAAATATCATGGTCCTTCAGCGGGGCGTGCCTCCCCTGTCCCTTGTGGGCATCT
TCTCGCCAGGACACGCACGCGGCGCGCTGCGTGTTCCCGCCTTGTGACTTCTAGGCGGGCGAGTCCCTGGGAGAG
GGTTGGATGACGTCAGCATCGCCAACATTCGGGCTCC
>H1_253-H1_407 (SEQ ID NO: 1187)
TGGGAAAAAAAGGCTTCACGCAGAATATATAAGGCTCCCATATCTAAAGACATTTCAAGGTTAGGGTGACTTCCC
CCACAATACATAGCGACATGCAAATATCATGGTCCTTCAGCGGGGCGTGCCTCCCCTGTCCCTTGTGGGCATCTT
CTCGCCAGGACGCACGCGCGCTGCGTGTTCCCGCCTTGTGACTCTAGGCTGGCGAGTCCCTGGGAGAGGGTTGAT
GACGTCAGCATCGTCAACATTCGGGCTCC
>H1_261-H1_259 (SEQ ID NO: 1188)
CGGGAAAAAAACGGCTTCTGGTGGAAAATATATGAGGCCCATACCTGAAGACCTTTCACGGTTATGGTGACTTCC
CACAATACATAGCGACATGCAAATATAGTGGGGCGTGCCTCCACTGTCCTTTGCGGGCATCGTCTCGCCAGGAAG
CGCGCGCTGCGTGTTCCCGCCTTTTGACTCTAGGCGGGCGAATCCTGGGAGAGGGTTGTTGACGTCAACATTCGG
GCTCC
>H1_261-H1_260 (SEQ ID NO: 1189)
CAAGAGAAAACCGAGCCCTGCTGGAAAATATATGAGGCCCACTCTTCAAGACCTTTTATGGTTATGGTAACTTCC
CATAACACATAGCGACATGCAAATATCGTGGGGTGTGCCTCCACGGTCCTTTGCGGACACCGTCTTGCCCGTAAG
CGCGCTGGGTATTCCCGCCTTCTGACTCTAGGCGGGCGAATCCTAGGAGAGGGTTGTTGACGTCGACATTCGGGC
ACC
>H1_261-H1_264 (SEQ ID NO: 1190)
CAAGAGAGAAACGTGCCCTGCTGGAAAATATATGAGGCCCATTCCTCAAGACCTTTTATGGTTATGGTGACTTCC
CACAACACATAGCGACATGCAAATATCGTGGGGTGTGCCTCCACTGTCCTTTGCGGACACCGTCTTGCCCGTAAG
CGCGCGCTGTGTATTCCCGCCTTTTGACTCTAGGCGGGCGAATCCTGGGAGAGGGTTGTTGACGTCGACATTCGG
GCTCC
>H1_261-H1_265 (SEQ ID NO: 1191)
CAAGAAAGAAACGTCCTCTGGTGGAAAATATATGAGGCCCATTCCTCAAGACCTTTTACGGTTATGGTGACTTCC
CACAACACATAGCGACATGCAAATATCGTGGGGTGTGCCTCCACTGTCCTTTGCGGACACCGTCTTGCCCGTAAG
CGCGCGCTGTGTATTCCCGCCTTTTGACTCTAGGCGGGCGAATCCTGGGAGAGGGTTGTTGACGTCGACATTCGG
GCTCC
>H1_261-H1_268 (SEQ ID NO: 1192)
CAAGAAAGAAACGTCCTCTGGTGGAAAATATATGAGGCCCATTCCTCAAGACCTTTTACGGTTATGGTGACTTCC
CACAATACATAGCGACATGCAAATATCGTGGGGTGTGCCTCCACTGTCCTTTGCGGACACCGTCTTGCCCGTAAG
CGCGCGCTGTGTATTCCCGCCTTTTGACTCTAGGCGGGCGAATCCTGGGAGAGGGTTGTTGACGTCGACATTCGG
GCTCC
>H1_261-H1_269 (SEQ ID NO: 1193)
CAAGAAAGAAACGTGCTCTGGTGGAAAATATATGAGGCCCATTCCTCAAGACCTTTTACGGTTATGGTGACTTCC
CACAACACATAGCGACATGCAAATATCGTGGGGTGTGCCTCCACTGTCCTTTGCGGACACCGTCTTGCCCGTAAG
CGCGCGCTGTGTATTCCCGCCTTTTGACTCTAGGCGGGCGAATCCTGGGAGAGGGTTGTTGACGTCGACATTCGG
GCTCC
>H1_261-H1_270 (SEQ ID NO: 1194)
CGGGAAAAAAACGGCCTCTGGTGGAAAATATATGAGGCCCATACCTGAAGACCTTTCACGGTTATGGTGACTTCC
CACAATACATAGCGACATGCAAATATCGTGGGGCGTGCCTCCACTGTCCTTTGCGGGCATCGTCTCGCCCGGAAG
CGCGCGCTGTGTGTTCCCGCCTTTTGACTCTAGGCGGGCGAATCCTGGGAGAGGGTTGTTGACGTCAACATTCGG
GCTCC
>H1_261-H1_272 (SEQ ID NO: 1195)
TGGGAAAAAGAGGGCTTCACGCGGAATATATAAGGCTCCCATACCTAAAGACCTTTCACGGTTAGGGTGACTTCC
CCACAATACATAGCGACATGCAAATATAGTGGGGCGTGCCTCCCCTGTCCCTTGCGGGCATCTTCTCGCCAGGAC
ACGCGCGCGCCGCGCTGCGTGTTCCCGCCTTTTGACTTCTAGGCGGGCGAATCCTGGGAGAGGGTTGGATGACGT
CCAACATTCGGGCTCC
>H1_261-H1_292 (SEQ ID NO: 1196)
CGGGAAAAAAAGGGCTTCTGGCGGAAAATATATGAGGCCCATACCTGAAGACCTTTCACGGTTATGGTGACTTCC
CACAATACATAGCGACATGCAAATATAGTGGGGCGTGCCTCCCCTGTCCCTTGCGGGCATCTTCTCGCCAGGAAG
CGCGCGCGCTGCGTGTTCCCGCCTTTTGACTCTAGGCGGGCGAATCCTGGGAGAGGGTTGATGACGTCAACATTC
GGGCTCC
>H1_263-H1_271 (SEQ ID NO: 1197)
CAAGAGAGAAACTTGTCGTGCTGGAAAATATATGAGGCCCATTCCTCAGGACCTTTTATGGTTAGGGTGATTTCC
CACAATACATAGCGACATGCAAATATAGTGGGGTGTGCTTCCACTGTCCTTTGCGGACACCGTCTCGCCCGTAAG
CGCGCGCTGTGTATTCCCGCCTTTTGACTCTAGGCGGGCGAATCCTGGGAGAGGGTTGTTGACGTCGACATTCGG
GCTCC
>H1_264-H1_263 (SEQ ID NO: 1198)
CAAGAGAGAAACTTGTCGTGCTGGAAAATATATGAGGCCCATTCCTCAGGACCTTTTATGGTTAGGGTGACTTCC
CACAACACATAGCGACATGCAAATATCGTGGGGTGTGCTTCCACTGTCCTTTGCGGACACCGTCTCGCCCGTAAG
CGCGCGCTGTGTATTCCCGCCTTTTGACTCTAGGCGGGCGAATCCTGGGAGAGGGTTGTTGACGTCGACATTCGG
GCTCC
>H1_266-H1_267 (SEQ ID NO: 1199)
CGAGGAAATAATCTCCCCTGGTGGCAAATATAGGAAGCCCATTCCTCAAGACCTTTTAAGGTTACGGTGACTTCC
CACAATACATAGCAACATGCAAATATTGTGGGGTGTGCCTTCACTGTCCTTTGCGGTCACTGTCTTGCCCATAAG
CGCGCTGTGTAATCCCGCCTTTTGACGTTAGGCAGGCGAATCCTGGGAGAGGGTTGCTGACGTCGACATTCGGCT
CC
>H1_268-H1_266 (SEQ ID NO: 1200)
CAAGGAAGTAACGTCCTCTGGTGGAAAATATATGAGGCCCATTCCTCAAGACCTTTTACGGTTATGGTGACTTCC
CACAATACATAGCAACATGCAAATATCGTGGGGTGTGCCTCCACTGTCCTTTGCGGACACTGTCTTGCCCGTAAG
CGCGCTGTGTAATCCCGCCTTTTGACTCTAGGCGGGCGAATCCTGGGAGAGGGTTGTTGACGTCGACATTCGGCT
CC
>H1_272-H1_273 (SEQ ID NO: 1201)
GGGGAGAAGGCGCTTTCCGCGGATTATATAAGGCTCCAGCACCTAGAGGCCTTTAACAGTTAGGGTGATTTCCCA
CAATGCATAGCGACATGCAAATATAGTTGGGTGTGCTTTCCCTGTTCCTTGCCTGCATCTTCTTGCCTGCGTGTT
CCCGCCTTTTGACTGCAGGCGGGCGAATCCTGGGAGAGAGTTGATGACGTCAACACTCAGGCTCC
>H1_272-H1_274 (SEQ ID NO: 1201)
GGGGAGAAAGGGGCTTCACGCGGAATATATAAGGCTCCCGTACCTAAAGGCCTTTCACGGTTAGGGTGACTTCCC
CACAATACATAGCGACATGCAAATATAGTTGGGCGTGCCTCCCCTGTCCCTTGCGGGCATCTTCTCGCCAGGACA
CGCGCGCGCCGCGCTGCGTGTTCCCGCCTTTTGACTTCCAGGCGGGCGAATCCTGGGAGAGGGTTGGATGACGTC
CAACATTCGGGCTCC
>H1_274-H1_291 (SEQ ID NO: 1202)
GGGGAGAAAGGGGCTTCACGGCGAATATATAAGGCTCCCGTACCTAAAGGCCTTTCACGGTTAGGGTGACTTCCC
CACAATACATAGCGACATGCAAATATAGTTGGGCGTGCCTCCCCTGTCCCTTGCGGGCATCTTCTCGCCCGGACA
CGCGCGCGCCGCGCTGCGTGTTCCCGCCTTTTGACTTCCAGGCGGGCGAATCCTGGGAGAGGGTTGGATGACGTC
CAACATTCGGGCTCC
>H1_276-H1_280 (SEQ ID NO: 1203)
AGGAAGGGAGCCTCACACGGCGGCTATATAAGGCCCCCTGCCCTGTAGGCCTTTCACAGTTAGGGCGACTTCCCC
ACAACACATAGCGACATGCAAATGTGGATGGGCGTGCCTCCCCGGTCCCTGCCGGCAACTTCTCTCCGGGACGCG
CGCTCGCGCTGAGTGTTCCCGCCTTTTGACGCCAGCGGAGCGAATCCGGGGAGCGGGCGGATGACGTCAACAGTG
CGGCTCC
>H1_279-H1_276 (SEQ ID NO: 1204)
AGGAAGGGAGCCTCACACGGCGGCTATATAAGGCCCCCTGCCCTGTAGGCCTTTCACAGTTAGGGCGACTTCCCC
ACAACACATAGCGACATGCAAATGTAGATGGGCGTGCCTCCCCGGTCCCTGCCGGCAACTTCTCTCCGGGACGCG
CGCTCGCGCTGAGTGTTCCCGCCTTTTGACGCCAGCCGAGCGAATCCGGGGAGCGGGCGGATGACGTCAACAGTG
CGGCTCC
>H1_280-H1_277 (SEQ ID NO: 1205)
AGGAAGGGAGCCTCACACGGCGGCTATATAAGGCCCCCTGCCCTGTAGGCCTTTCACAGTTAGGGCGACTTCCCC
ACAACACATAGCGACATGCAAATGTGGATGGGCGTGCCTCCCCGGTCCCTGCCAGCAACTTCTCTCCGGGACGCG
CGCTCGCGCTGAGTGTTCCCGCCTTTTGACGCCAGCGGAGCGAATCCGGGGAGCGGGCGGATGACGTGAACAGTG
CGGCTCC
>H1_282-H1_279 (SEQ ID NO: 1206)
GGGAAGAGAGCCTCACACGGCGGCTATATAAGGCCCCCTTACCTATAGGCCTTTTACGGTTAGGGTGACTTCCCC
ACAACACATAGCGACATGCAAATTTAGATGGGCGTGCCTCCCCTGTCCCTGTGGGCAACTTCTCTCCGGGACACG
CGCGCTCGCGCTGAGTGTTCCCGCCTTTTGACTTCCAGCCGAGCGAATCCTGGGAGAGGGCAGATGACGTCAACA
GTCAGGCTCC
>H1_282-H1_281 (SEQ ID NO: 1207)
GGGAAGAGGGCCTCACACGAGGGCTATATAAGGCCCCCTTACCTATAGGCCTTTTACGGTTAGAGTGACTTCCCA
CAACACCTAGCGACATGCAAATTTAGATGGGCGTGCCTCCTCTGTCCCTGTGGCAACACCTCTCCGGGACGCGCG
CTCGCTCTGAGTGTTCCCGCCTTTTGACTTCCAGCCGAACGAATCCTGGGAGAGGGCAGATGACGTCAATAGTCA
GGCTCC
>H1_282-H1_283 (SEQ ID NO: 1208)
GGGAAGAGGGCCTCACACGAGGGCTATATAAGGCCCCCTTACCTATAGGCCTTTTATGGTTAGAGTGACTTCCCA
CAACACCTAGCGACATGCAAATTTAGATGGGCGTGCCTCCTCTGTCCCTGTGGCAACACCTCTCCGGGACGCGCG
CTCGCTCTGAGCGTTCCCGCCTTTTGACTTCCAGCCGAACGAATCCTGGGAGAGGGCAGTGACGTCAATAGTCAG
GCTCC
>H1_282-H1_284 (SEQ ID NO: 1209)
GGGAAGAGAGCCTCACACGGCGGCTATATAAGGCCCCCTTACCTATAGGCCTTTTACGGTTAGGGTGACTTCCCA
CAACACATAGCGACATGCAAATTTAGATGGGCGTGCCTCCCCTGTCCCTGTGGGCAACTTCTCTCCGGGACACGC
GCGCTCGCGCTGAGTGTTCCCGCCTTTTGACTTCCAGCCGAGCGAATCCTGGGAGAGGGCAGATGACGTCAACAG
TCAGGCTCC
>H1_285-H1_282 (SEQ ID NO: 1210)
GGGAAGAGAGGCCTACACGGCGGCTATATAAGGCCCCCTTACCTATAGGCCTTTTACGGTTAGGGTGACTTCCCC
ACAACACATAGCGACATGCAAATTTAGATGGGCGTGCCTCCCCTGTCCCTGTGGGCAACTTCTCTCCGGGACACG
CGCGCTCGCGCTGAGTGTTCCCGCCTTTTGACTTCCAGCCGAGCGAATCCTGGGAGAGGGCAGATGACGTCAACA
GTCAGGCTCC
>H1_287-H1_285 (SEQ ID NO: 1211)
GGGAAGAGAGGCACTACACGGCGGCTATATAAGGCCCCCTTACCTATAGGCCTTTTACGGTTAGGGTGACTTCCC
CACAACACATAGCGACATGCAAATTTAGATGGGCGTGCCTCCCCTGTCCCTGTGGGCAACTTCTCTCCGGGACAC
GCGCGCTCCGCGCTGAGTGTTCCCGCCTTTTGACTTCCAGCCGAGCGAATCCTGGGAGAGGGCAGATGACGTCCA
ACAGTCAGGCTCC
>H1_287-H1_288 (SEQ ID NO: 1212)
GGGAGAAGGGGGAGTACACGGCGGATATATAAGGCCCCCTTATGTATAGTCCTTTTACGGTTAGGGTGACTTCCC
ACAACGCATAGCGACATGCAAATTTGACGGGCGTGCCTCCTCTGTCCCTGCGGGCAACTTCTCTCCTGGACGCGC
GCTCCGCGCTGCGTGTTCCCGCCTTTTGACTCCAGCCGAGCGAATCCTGGGAGAGGGCAGGTGACGTCCAACAGT
CAGGCTCG
>H1_287-H1_290 (SEQ ID NO: 1213)
GAGAGAGGCTGTGCACACGGCGGATATATAAGGCCCCCTTATGTATAATCCTTTACCGGTTAGGGTGACTTCCCA
CAACGCATAGCGACATGCAAATTTGACGGGCGTGCCTCCTCTGTCCCTGCGGGCAACTTCTCTCCTGGACGCGCG
CTCCGCGCTGCGTGTTCCCGCCTTTTGACTCCAGCCGAGCGAATCCTGGGAGAGGGCAGGTGACGTCCAACAGTC
AGGCTCG
>H1_288-H1_289 (SEQ ID NO: 1214)
GGGAGAAGGGGGAGTACACGGCGGATATATAAGGCCCCCTTATGTATAGTCCTTTTACGGTTAGGGTGACTTCCC
ACAACGCATAGCGACATGCAAATTTGACGGGCGTGCCTCCTCTGTCCCTGCGGGCAACTTCTCTCCTGGACGCGC
GCTCGCGCTGCGTGTTCCCGCCTTTTGACTCCAGCCGAGCGAATCCTGGGAGAGGGCAGGTGACGTCAACAGTCA
GGCTCG
>H1_291-H1_287 (SEQ ID NO: 1215)
GGGAAGAGAGGCACTACACGGCGGCTATATAAGGCCCCCTTACCTATAGGCCTTTTACGGTTAGGGTGACTTCCC
CACAACACATAGCGACATGCAAATTTAGATGGGCGTGCCTCCCCTGTCCCTTGTGGGCAACTTCTCTCCGGGACA
CGCGCGCTCCGCGCTGAGTGTTCCCGCCTTTTGACTTCCAGCCGAGCGAATCCTGGGAGAGGGCAGGATGACGTC
CAACAGTCAGGCTCC
>H1_294-H1_295 (SEQ ID NO: 1216)
TAGAAAAAATCGTAGTTTATGCTGGATTTATAAGATTCCCACATCTAAAGCCATTTCACAGTTACGGTGAACTTC
CCACTACACACGGCGATATGCAAATATAGCGGAAGTGTTCCTGAGGCGTGGTAAAGCGCGCGCGCGCTGAGAGTT
CCCGCCCTGTGGTGCTGGGCTGGAGATGCCTGAGAACTGGCTGATGACGGCAACGTTCGGGCTCC
>H1_295-H1_296 (SEQ ID NO: 1217)
TAGAAAAAATCGTGCCTATGCTGGATTTATAAGATTCCCACATCTAAAGCCATTTCTCAGTTACGGTGAACTTCC
CACTACACACGGCGATATGCAAATATAGCGGAAGTGTTCCTGAGGCGTGGTAAAGCGCGCGCGCGCTGAGAGTTC
CCGCCCTGTGGTGCTGGGCTGGAGATGCCTGAGAACTGGCTGATGACGGCAACGTTCGGGCTCC
>H1_296-H1_297 (SEQ ID NO: 1218)
TAGAAAAAATCGTGCCTACGCTGGATTTATAAGATTCCCACATCTAAAGCCATTTCTCAGTTACGGTGAACTTCC
CACTACACACGGCGATATGCAAATATAGCGGAAGTGTTCCTGAGGCGTGGTAAAGCGCGCGCGCGCTGAGAGTTC
CCGCCCTGTGGTGCTGGGCTGGAGATGCCTGAGAACTGGCTGATGACGGCAACGTTCGGGCTCC
>H1_298-H1_294 (SEQ ID NO: 1219)
TAGAAAAAATGGTAGTTTATGCGGGATTTATAAGACTCCCACATCTAAAGCCATTTCACAGTTACGGTGACTTCC
CCACAACACACGGCGATATGCAAATATAGCGGAAGTGTTCCTGAGGCGTGGTAAAGCGCACGCGCGCTGAGAGTT
CCCGCCCTGTGGTGCTGGGCCCGAGATGCCTGAGAGCGGGCTGATGACGGCAGCGTTTGGGCTCC
>H1_299-H1_298 (SEQ ID NO: 1220)
TAGAAAAAAGGGGAGTTTATGCGGGATTTATAAGACTCCCATATCTAAAGACATTTCACAGTTATGGTGACTTCC
CCACAACACATGGCGATATGCAAATATCGCGGAGCTGGCCCTGAGGCGTGGTAAGGCGCACGCGCGCTGAGAGTT
CCCGCCCTGTGGCGCTGGGCCCGAGATTCCTGAGAGCGGGTTGATGACGGCAGCGTTTGGGCTCC
>H1_299-H1_300 (SEQ ID NO: 1221)
TAGAGAAAAGGGGGTGTTTGCGGGATTTATAAGATTCCCATTGCTAAAGACATTTCACAGTTATGGTGACTTCCC
ACAACACTTGGCGATATGCAAATATCACGGAGTTGGCCCTGAGGCGCGGCGAGACGCACGCGCGCTGAGAGTTCC
CGCCTTCTCACCCTGGGTCCAAGGTTCCTGAAGGCGGGTTGAAGACTGCAGTGTTTGGGCGCC
>H1_301-H1_299 (SEQ ID NO: 1222)
TAGGAAAAAGGGGGGTTTATGCAGGATTTATAAGACTCCCATATCTAAAGACATTTCACGGTTATGGTGACTTCC
CCACAACACATAGCGATATGCAAATATCGCGGAGCGGGCCCTGAGGCGTGGTCAGGCGCACGCGCGCTGCGAGTT
CCCGCCCTGTGGCGCTGGGCCCGAGATTCCTGAGAGCGGGTTGATGACGTCAGCGTTTGGGCTCC
>H1_301-H1_302 (SEQ ID NO: 1223)
TAGGAAACGCGCATTTTAGGCAGGATTTATAAGACACCCATATCTAAAGACATTTCACGGTTATGGTGACTTCCC
ACAACACATAGCGAAATGCAAATATGTGGAGCAGGCGCTGAGGCGTGGTCGGGCGCACGCGCGCTGCGAGTTCCC
GCCCTTCGGCGCTAGGCCCGAGATGCCTGAGAGCTGGTTGATCACGTCTGCGTTTGGACTCA
>H1_301-H1_303 (SEQ ID NO: 1224)
TAGGAAAAGAGCATTTTAGGCAGGATTTATAAGACACCCATATCTAAAGACATTTCACGGTTATGGTGACTTCCC
ACAACACATAGCGAAATGCAAATATGTGGAGCGGGCGCTGAGGCGTGGTCGGGCGCACGCGCGCTGCGAGTTCCC
GCCCTTCGGCGCTAGGCCCGAGATTCCTGAGAGCTGGTTGATGACGTCAGCGTTTGGACTCC
>H1_304-H1_253 (SEQ ID NO: 1225)
TGGGAAAAAGAGGGGCTTCACGCAGCATTTATAAGGCTCCCATATCTAAAGACATTTCACGGTTAGGGTGACTTC
CCCCACAATACATAGCGACATGCAAATATCATGGTCCTTCAGCGGGGCGTGCCTCCCCCTGTCCCTTGGCCCGTG
GGCATCTTCTCGCCAGGACACGCACGCGGCGCGCTGCGTGTTCCCGCCTTGTGACTTCTAGGCGGGCGAGTCCCT
GGGAGAGGGTTGGATGACGTCAGCATCGCCAACATTCGGGCTCC
>H1_304-H1_293 (SEQ ID NO: 1226)
CGGGAAAAAGACGGGCCTCACGCCGCATTTATAAGGCTCCCATATCTAACGACATTTTACGGTTAGGGTGACTTC
CCACAATACATAGCGATATGCAAATATAGCGGGGCGTGTCTCCCCCTGGCCCTTGGCTCGTGGGCATCGTCTCGC
CAGGACGCATGCGCGCTGCTTGTTCCCGCCTTGACTACTTGCTAGTCCTGGGAGAGGGTTGATGACGTCAACGTT
CAGACTCC
>H1_304-H1_311 (SEQ ID NO: 1227)
CCGGCATAAGACGGGCCTCACGGCGCACTTATAAGGATCCCATATCTAACGACATTTTACGGTTAGGGTGACTTC
CCACAATACATAGCGATATGCAAATATAGCGGGGCGTGTCTACTCCTGGCCCTTGGTTTGTGGGCGTCGTCTCGC
CAGGACGCATGCGCACTGCTTGTTCCCGCCTTGACTACTTGCTAGTCCTGGGAGAGGGTTGATGACGTCAACGTT
CAGACTCC
>H1_306-H1_307 (SEQ ID NO: 1228)
TCAGCGTAAAGGAGTGCGTACAAAGAATTTATAAGGCTCGCATAGCTCTAGCTGCTTCACAGTTAGGGTGACTTC
CCACAAGCCATAGCGCATGTAAATATAAGGGCGTTTGTTCCCCCGCCCCCGTCCAGGCTGCAGCATCTCTCCAGG
ACGCAGGCGCACTGAGCCTTCCCGCCCGGTCACTCCAGACCCGCCATTCCCGGGCCAGGTTAATGACGTCACACT
TAAGCTCC
>H1_306-H1_310 (SEQ ID NO: 1229)
TCAGCGTAAAGGGATGCTTACGTAGAATTTATAAGGCTCCCATACCTAAAGCCATTTCACGGTTAGGGTGACTTC
CCACAAGACATAGCGACATGCAAATATAGAGGGGCGTGCTTCCCCTGTCCCGTCCCGTAGGCGTCTTCTCGCCAG
GGACGCACGCGCGCTGCGCCCTGTTCCCGCCCTGTCACTAGGGATTCTGGGCCGGCCATTCCCCGGGCGCAGGTT
GATGACGTCACGTTTGGGCTCC
>H1_308-H1_309 (SEQ ID NO: 1230)
TCAGCGTAAAAGAATGCTTAGCTAGAATTTATAAGGCTCCCAGACCTAAAGCCATATCTCGGTTAGGGTGACTTC
CCACAAGACATAGCGACATGCAAATATAGAGGGGCGGGCTTCCCCTGTGCCTTGTAGGCGTCTTCTCACGAAGTC
GCAAGCGCGTTGCGCCCTGTTCCCGCCCTGTCACTATTGATTATTGGCCGACCTTTCCTCGGGCGGAGTCTGATG
ACGTCATCGGTTCC
>H1_310-H1_308 (SEQ ID NO: 1231)
TCAGCGTAAAGGAATGCTTACCTAGAATTTATAAGGCTCCCAGACCTAAAGCCATATCACGGTTAGGGTGACTTC
CCACAAGACATAGCGACATGCAAATATAGAGGGGCGGGCTTCCCCTGTGCCTTGTAGGCGTCTTCTCACGAAGGA
CGCACGCGCGCTGCGCCCTGTTCCCGCCCTGTCACTATTGATTATTGGCCGACCATTCCCCGGGCGCAGTCTGAT
GACGTCATTCGGTTCC
>H1_312-H1_313 (SEQ ID NO: 1232)
TGGGGGAAGCTGGGCTCGATCAGCCTTTATAAAGCTCCAAAAACTCAAGACATTTTTCCGTTACGGTGGCTTCCC
ACAGTACACAGCGACATGCAAATAGCTTGCCAATGAATTCGCGGACCGCTTCCCGCCCCGGCGCAGGCGCGCGGA
CGCTGTCTCCCCTGGACGCGCGCTCGCGGTTCCCGGGAGCTGGCTGATGACGTTCGGTCTCC
>H1_312-H1_314 (SEQ ID NO: 1233)
TGGGGAAAGGTGGGCTCAAGCAGACTTTATAAAGCTCCAAAAACTCAAGACATTTTTCCGTTACGGTGGCTTCCC
ACAATACACAGCGACATGCAAATATAGTGGAGTGTGCTTGCCAATGATTTCCCGGGCCGCTTCTCGCCACGGCGC
AGGCGCGCTGTGTGTTCCCGCCCTGGACGGGCGCGCCCGCGGTTCCCGGGAGCGGGTTGATGACGTTCGGTCTCC
>H1_314-H1_315 (SEQ ID NO: 1234)
TGGGGAGTGGTGGATCCAAGCAGACTTTATAAAGCTCCGAAGGTCCAAGGCATCTTTCCCTTACGGTGGCTTCCC
ACAAGACATAGCGATATGCAAATTTATCGATACGTGCTTCAGACGCGCTTCTCGCCGCAGCGCAAGCGCGCTGTG
TGCTGACGCGGGGGACGGGCCAGTGCGCGATTCCCGGGAGCGGGTTGATGACGTTCGATCTCC
>H1_317-H1_316 (SEQ ID NO: 1235)
TGGGGAGAGGTGGATCCGAACAGACTTTATAAAGCTCCGAAAGCCCAAGGCATCTTTCCCTTACGGTAGCTTCCC
ACAAGACATAGCGACATGCAAATTTCTTGAAGTATGCTTCAGACGCGCTTCTCGCCACAGCGCAAGCGCGCTGTG
TGCTGACGCGGGAACGGGCCAGTGCGCGGTTCCCGGGAGCGGGTTGATGACGTTAGATCTCC
>H1_318-H1_317 (SEQ ID NO: 1236)
TGGGGAGAGGTGGATCCAAACAGACTTTATAAAGCTCCGAAAGCCCAAGGCATCTTTCCCTTACGGTGGCTTCCC
ACAAGACATAGCGACATGCAAATTTATTGAAGTATGCTTCAGACGCGCTTCTCGCCGCAGCGCAAGCGCGCTGTG
TGCTGACGCGGGAGACGGGCCAGTGCGCGGTTCCCGGGAGCGGGTTGATGACGTTCGATCTCC
>H1_322-H1_319 (SEQ ID NO: 1237)
TTCAGGGTGTAGACCGGCCGCCACTATAAGGCTCGAAAGAGGAATAAATTTTTCGTTTAGGGTGATTTCCCACAA
AGCACAGCGCGTAATTTGCATGTGCTCTACCCCAGGCTCCTGTGCTAGACAAGAAGCCCGCGCATCCGGGCAAGG
GATGATGACGTCGTCCTTCAAGAGCG
>H1_322-H1_321 (SEQ ID NO: 1238)
TTCAGGGTGTAGACCGGCCGCCACTATAAGGCTCGAAAGAGGAATAAATTTTTCGTTTAGGGTGATTTCCCACAA
AGCACAGCGCGTAATTTGCATGTGCTCTATCCCAGGCTCCTGTGCCAGACAAGAAGCCCGCGCATCCGGGCAAGG
GATGATGACGTCGTCCTTCAAGAGCG
>H1_322-H1_323 (SEQ ID NO: 1239)
TTCAGTGTGTAGACCGGCCGCCACTATAAGGTTCGAAAGAGGAATAAATTTTTCGTTTAGGGTGATTTCCCACAA
AGCACAGCGCGTAATTTGCATGTGCTCTACCCCAGGCTCCTGTGCTAGACAAGAAGCCCGCGCATCCGGGCAAGG
GATGATGACGTCGTCCTTCAAGAGCG
>H1_325-H1_327 (SEQ ID NO: 1240)
TGGAGGGTGTAGACCGGCCGCCACTATAAGGCTCGAAAGAGGAATAAATTTTTCGCTTACGGTGACTTCCCACAA
AGCACAGCGCGTAATTTGCATGTGCTCTATCCCAGGCTTCCTGTTCCAGACAAGAAGCCCGCGCATCCGGGCAAG
GGATGATGACGTCATCCCCGTCCTTCAAGCGCG
>H1_328-H1_329 (SEQ ID NO: 1241)
TGGAAGGTGGAGACCTGCCGCCATAATAAGACTCCAAAAGAGAGTGAATTTAACACTTACGGTGACTTCCCACAA
AGCACAGCGTGTAATTTGCATGCGCTCTAGCCCAGGCTCCAGCTCCGGACGAGAAGCCCGCGCATCCCGGCAAAG
GATGATGACGTCGTCCTTCAAGCGCT
>H1_328-H1_332 (SEQ ID NO: 1242)
TGGAGGGTGGAGACCGGCCACCATTATAAGACTCCAAAGCGGAATAAATTTTACGCTTATGGTGACTTCCCACAA
AGCACAGCGCGTAATTTGCATGTGCTCTATCCCAGGCTTCCTGCTCCAGACAAGAAGCCCGCGCATCCGGGCAAG
GGATGATGACGTCATCCCCGTCCTTCAAGCGCG
>H1_330-H1_328 (SEQ ID NO: 1243)
TGGAGGGTGGAGACCGGCCACCATTATAAGACTCCAAAGCGGAATAAATTTTACGCTTATGGTGACTTCCCACAA
AGCACAGCGCGTAATTTGCATGTGCTCTATCCCAGGCTTCCTGCTCCAGACAAGAAGCCCGCGCATCCGGGCAAG
GGATGATGACGTCATCCCCGTCCCTCAAGCGCG
>H1_332-H1_325 (SEQ ID NO: 1244)
TGGAGGGTGGAGACCGGCCACCATTATAAGACTCGAAAGCGGAATAAATTTTACGCTTATGGTGACTTCCCACAA
AGCACAGCGCGTAATTTGCATGTGCTCTATCCCAGGCTTCCTGCTCCAGACAAGAAGCCCGCGCATCCGGGCAAG
GGATGATGACGTCATCCCCGTCCTTCAAGCGCG
>H1_332-H1_333 (SEQ ID NO: 1245)
TACAGGGTGGAGATCGGCGAAAATTATAAGACTCGAAAGCGGCATAAAGTTTAAGCTTATGGTGACTTCCCACAA
AGCACAGCGCGTAATTTGCATGTGCTTTATCCCAGGCTCTTTCTCCAGACCAGTAGCCTGCACATCCGGGCAAGG
GGTGATGACGTCGTCCATCAAGCGCG
>H1_334-H1_330 (SEQ ID NO: 1246)
GGGAAGGTGGAGACCGGCCACCATTATAAGACTCCAAAGCGGAATACATTTTTCGGTTATGGTGACTTCCCACAA
AGCACAGCGCGTAATTTGCATGCGCTCTATCCCAGGCTTCCTGCTCCAGACAAGAAGCCCGCGCATCCGGGCAAG
GGATGATGACGTCATCCCCGTCCCTCAAGCGCG
>H1_335-H1_337 (SEQ ID NO: 1247)
ACGGCGGTGTGGAGGGCGAACTTTATAAGCCTCCGAAGAGAAAGCGATTTTTCAGTTATGGTGGTTTCCCACAAG
GCACAGCGCACAGTTTATTTGCATGCGCTCTAGCCCCGGCTCCCGCTCCAGACTAAGAAGCCCGCGCATTTCGGC
TGCGGATGATGACGTCGGGCCTCAAGCGCC
>H1_336-H1_335 (SEQ ID NO: 1248)
ACGGCGGTGTGGAGGGCGAACTTTATAAGCCTCCGAAGAGAAAGCGATTTTTCAGTTATGGTGGTTTCCCACAAG
GCACAGCGCACAGTTTATTTGCATGCGCTCCCGCCGCTTCTAGCCCCGGCTCCCGCTCCAGACTAAGAAGCCCGC
GCATTTCGGCTGCGGATGATGACGTCGGGCCTCAAGCGCC
>H1_338-H1_334 (SEQ ID NO: 1249)
GGGGAGGTGTGGGCCGGCCAGCTTTATAAGACTCCAAAGCGGAATGCATTTTTCAGTTATGGTGGCTTCCCACAA
GGCACAGCGCGCTGCTTATTTGCATGGGCTCACGCCGCTTCTAGCCCGGGCTTCCTGCTCCAGACTAAGAAGCCC
GCGCATCCCGGCCGGGCGAGGGATGATGACGTCATCCCCAGCCCTCAAGCGCG
>H1_338-H1_340 (SEQ ID NO: 1250)
GGAGGGCGGTGGCCGGCGAGCTTAATAAGCCTCGGAGGCGGGACGCCTGTTACAGTGACGGTGGTTTCCCACAAA
GCACGGCGCGGCGGTCTTGATTTGCATGCGCCTTTATGCCCGCCTCCCGCTCCGGAGAAGAAGCCCGCGCATCCC
GGCTGGGCTGGGGGTGATGACGTCAGGGCTCGAGCGCC
>H1_338-H1_342 (SEQ ID NO: 1251)
GGAGAGCGGTGGCCGGCGAGCTTAATAAGCCTCGGAAGCGGAACGCATTTTACAGTGATGGTGGTTTCCCACAAG
GCACAGCGCGGCGGCCTTTATTTGCATGCGCTTCTATTCCCGCCTCCCGCTCCAGAGAAGAAGCCCGCGCATCCC
GGCTCGGCTGGGGATGATGACGTCAGGGCTCGAGCGCC
>H1_338-H1_343 (SEQ ID NO: 1252)
GGGGTGGTGTGGCTGGCGAGCTTAATAAGGCTCCGAAGCGGAATGCATTTTACAGTGATGGTGGTTTCCCACAAG
GCACAGCGCGGCGTTTATTTGCATGCGCTTCTATTCCCGCCTCCCGCTCCAGACAAGAAGCCCGCGCATCCCGGC
TCGGCTGGGGATGATGACGTCAGGGCTCGAGCGCC
>H1_338-H1_344 (SEQ ID NO: 1253)
GGAGAGGGGTGGCCGGCGAGCTTAATAAGCCTCCGAAGCGGAACGCATTTTACAGTGATGGTGGTTTCCCACAAG
GCACAGCGCGGCGTTTATTTGCATGCGCTTCTATTCCCGCCTCCCGCTCCAGAGAAGAAGCCCGCGCATCCCGGC
TCGGCTGGGGATGATGACGTCAGGGCTCGAGCGCC
>H1_338-H1_345 (SEQ ID NO: 1254)
GGGGTGGTGTGGGTGGCGAGCTTTATAAGGCTCCGAAGCGGAATGCATTTTTCAGTTATGGTGGTTTCCCACAAG
GCACAGCGCGCCGTTTATTTGCATGGGCTCCCGCCGCTTCTAGCCCCGGCTCCCGCTCCAGACTAAGAAGCCCGC
GCATCCCGGCCCGGCTGGGGATGATGACGTCAGGCCTCAAGCGCC
>H1_338-H1_351 (SEQ ID NO: 1255)
GGGGAGGTGTGGGCGGCGAGCTTTATAAGACTCCAAAGCGGAATGCATTTTTCAGTTATGGTGGTTTCCCACAAG
GCACAGCGCGCTGCTTATTTGCATGGGCTCACGCCGCTTCTAGCCCGGGCTCCCGCTCCAGACTAAGAAGCCCGC
GCATCCCGGCCGGGCAGGGGATGATGACGTCAGCCCTCAAGCGCG
>H1_340-H1_341 (SEQ ID NO: 1256)
GCAAAGCGGTGGCCGGCGAGCTTAATAAGCCTCGGAGGCGGGACGCCTGTTACAGTGACGGTGGTTTCCCACAAA
GCACGGCGCGGCGGTCTTGATTTGCATGCGCCTTTATGCCCGCCTCCCGCTCCGGAGAAGAAGCCCGCGCATCCC
GGCTGGGCTGGGGGTGATGACGTCAGGGCTCGAGCGCC
>H1_346-H1_338 (SEQ ID NO: 1257)
GGGGAGGTGTGGGCCGGCCAGCTTTATAAGACTCCAAAGCGGAATGCATTTTTCAGTTATGGTGGCTTCCCACAA
GGCACAGCGCGCTGCTTATTTGCATGGGCTCACGCCGCTTCTAGCCCGGGCTTCCTGCTCCAGACTAAAGAAGCC
CGCGCATCCCGGCCGGGCGAGGGATGATGACGTCATCCCCAGCCCTCAAGCGCG
>H1_346-H1_347 (SEQ ID NO: 1258)
GGCGAGGGGTGGGCAGCCACCTTTATAAGACTCCAGAGCCGAATGCATTTCTCAGTTGTGGTGGCTTCCCATGAG
GCACAGCGCGCTATTTGCATGCGCTCTAGCCCGGGCTCCGGCTCTGGAATAAAAAATCCCGCGCATCCGGGTGAG
GGATGACGACGTCACCCTCAAGCGCT
>H1_349-H1_346 (SEQ ID NO: 1259)
GGGGAAGTGGGGGCAGGCCGGCTTTATAAGACTCCAGAGCGGAACGCATTTTTCAGTTATGGTGGCTTCCCACAA
GGCACAGCGCTATGCTTATTTGCATGGGCTCACGCCGCTTCTAGCCCGGGCCCCCTGCTCCAGACAAAAAAGCCC
GCGCATCCCGGCCGGGCGCGGGATGATGACGTCATCCCCAGCCCTCGAGCGCG
>H1_349-H1_348 (SEQ ID NO: 1260)
GAAGAAGTGGGGGAGACCGGCTTTATAAGACTCAGAAGGGAACAAACTTTTCAGTTGCGGTGGCTTCCCACAAGG
CACAGCGCTTTATTTGCATGCGCGCTAACCGGGGCCCCCTACTAAAAAGCCCGCGCATGCCCGGCGCGGGATGAT
GACGTCAGCCCTCGAGCGCG
>H1_349-H1_350 (SEQ ID NO: 1261)
GAAGTCGTGGGGGAGAGCGGCTTTATAAGACTCAGAAGGGAACAAACTTTTCAGTTGCGGTGGCTTCCCACAAGG
CACAGCGCTTTATTTGCATGCGCGCTAACCGGGGCCCCCTACTAAAAAGCCCGCGCATGTCCGGCGCGGGATGAT
GACGTCAGCCCCCGAGCGCG
>H1_352-H1_349 (SEQ ID NO: 1262)
GGGGAAGTGGGGGCAGGCCGGCTTTATAAGACTCCAGAGCGGAACGCATTTTTCAGTTATGGTGGCTTCCCACAA
GGCACAGCGCTATGCTTATTTCCATGGCCCCACCTCAGCATGGAAGCTCACGCCGCTTCTAGCCCGGGCCCCCTG
CTCCAGACAAAAAAGCCCGCGCATCCCGGCCGGGCGCGGGATGATGACGTCATCCCCAGCCCTCGAGCGCG
>H1_352-H1_354 (SEQ ID NO: 1263)
GGGAAGGCGGGGCCGGCGGCGCTAAAAGGCTCCGGGGCGGCCCGGACTTATCAGTTACGGTGGCTTCCCACGAGG
CGCAGCGCCGCTCATTTGCATGGCCCCACCCCAGACGGGAAGCCCGCGCCGCTCATTTGCGTGGCCCCGCCCCAG
ACGGGAAGCCCGCGCTGCTCGGCCGCGGTGGTGACGTCGGCCTCTCGCGCC
>H1_352-H1_356 (SEQ ID NO: 1264)
GGGAAAGCGGGGCCGGCGGCGCTAAAAGACTCCAGGGCGGCCCGGACTTATCAGTTACGGTGGCTTCCCACGAGG
CGCAGCGCCGCTCATTTGCATGGCCCCACCCCAGAAGGGAAGCCCGCGCCGCTCATTTGCGTGGCCCCGCCCCAG
ACGGGAAGCCCGCGCTGCCCGGCCGCGGTGGTGACGTCGGCCTCTCGCGCC
>H1_354-H1_355 (SEQ ID NO: 1265)
GGGAAGGCGGGGCCGGCGGCGCTAAAAGGCTCCGGGGCCGCCCGGACTTCACAGTTACGGTGGCTTCCCACGAGG
CGCAGCGCTGTCATTTGCATGGCCCCGCCCCAGACGGGAAGCCCGCGCTGCTCATTTGCGTGGCCCCGCCCCAGA
CGGGAAGCCCGCGCTGCTCGGCCGCGGTGGTGACGTCGGCCTCTCGCGCC
>H1_357-H1_358 (SEQ ID NO: 1266)
TGAAAGGGGCTCATCACAAGCAGAGTTTATAAGGCTCCCATGTGTACAGCCATTTCTCGGTCATGGTAACTACCC
ACAACACACAGCGATATGCAAATATAGCAGAGAGTGTCTTCCCGCGCGCGCCTGGTCGTCTTCGCGCCGGCGCGC
TGCGTGGAGCGGAACTATGACAGAGACCCTGCGATTCCTGGGAGCTGGCTGATGACGTCAGTGTCTAACCTCC
>H1_357-H1_359 (SEQ ID NO: 1267)
TGAAAGGAACTCATCACAAGCAGAGTTTATAAGGCTCCCATGTGTACAGCCATTTCTCGGTCATGGTAACTACCC
ACAACACACAGCGATATGCAAATATAGCAGAGAGTGTCTTCCCGCGCGCGCCTGGTCGTCTTCGCGCCGGCGCGC
TGCGTGGAGCGGAACTATGACAGAGACCCTGCGATTCCTGGGAGCTGGCTGATGACGTCAGTGTCTAACCTCC
>H1_357-H1_360 (SEQ ID NO: 1268)
TGAAAGGAACTCATCACAAGCAGAGTTTATAAGGCTCCCATGTGTACAGCCATTTCTCGGTCATGGTAACTACCC
ACAACACACAGCGATATGCAAATATAGCAGAGAGTGTCTTCCCGCGCGCGCCTGGTCGTCTTCGCGCCGGCGCGC
TGCGTGGAGCGGAACTGTGACAGAGACCCTGCGATTCCTGGGAGCTGGCTGATGACGTCAGTGTCTAACCTCC
>H1_357-H1_363 (SEQ ID NO: 1269)
TGAAAGGAACTCATCTCAAGCAGAGTTTATAAGGCTCCCATGTGTACAGCCATTTCTCGGTCATGGTAACTACCC
ACAACACACAGCGATATGCAAATATAGCAGAGAGTGTCTTCCCGCGCGCGCCTGGTCGTCTTCGCGCCGGCGCGC
TGCGTGGAGCGGAACTGTGACAGAGACCCTGCGATTCCTGGGAGCTGGCTGATGACGTCAGTGTCTAACCTCC
>H1_357-H1_365 (SEQ ID NO: 1270)
TGAGAGAAAATAAGCTCAAGCAGAACTTATAAGGCTCCCAAATGTACAGACATTTCTCGGTCATGGTAACTACCC
ACAACACACAGCGATATGCAAATATAGCAGAGTGTGCCTCCCCGCTCCCGTCCGGTCGTCTTCTCGCCGGAGCGC
AGGCGCGCTGCGTGGTGCGGGACTGTGACCCTGAGCCTGCGATTCCTGGGAGCGGGCTGATGACGTCAGCGTCTG
ACCTCC
>H1_357-H1_367 (SEQ ID NO: 1271)
TGAGAGAAACTAATCTCAAGCAGAACTTATAAGGCTCCCATATGTACAGACATTTCTCGGTCATGGTAACTACCC
ACAACACACAGCGATATGCAAATATAGCAGAGTGTGCCTCCCCGCTCGCGTCCGGTCGTCTTCTCGCCGGAGCGC
AGGCGCGCTGCGTGGTGCGGGACTGTGACCCTGAGCCTGCGATTCCTGGGAGCGGGCTGATGACGTCAGCGTCTA
ACCTCC
>H1_357-H1_368 (SEQ ID NO: 1272)
TGAGAGAAAGTAAGCTGAAGCAGAACTTATAAGGCTCCCAAATCTACAGACATTTCTCGGTCATGGTGACTACCC
ACAACACACAGCGATATGCAAATATCGCGGGGTGTGCCTCCCTGCTCTCGTCCGGTCGTCTTCTCGCCAGGGCGC
AGGCGCGCTGCGTGGTCCGGGCCTGTGACCCTGAGCCCGCGATTCCTGGGAGCGGGTTGATGACGTCAGCGTTTG
ACCTCC
>H1_357-H1_374 (SEQ ID NO: 1273)
TGGGAGAAAGTGGGCTGAAGCAGAACTTATAAGGCTCCCAAATCTAAAGACATTTTTCGGTCATGGTGACTTCCC
ACAACACACAGCGATATGCAAATATCGCGGGGTGTGCGCCTCCCTGCTCTCGTCCAGTCGTCTTCTCGCCAGGGC
GCACGCGTACTAGCGCGCTGCGTTGTTCCCGGCCTGTGACAGAGCCTGAGCCCGCGATTTCCTGGGAGCGGGTTG
ATGACGTCAGCGTTTGAACTCC
>H1_357-H1_395 (SEQ ID NO: 1274)
TGGGAGAAAGTGGGCTGAAGCAGAACTTATAAGGCTCCCAAATCTAAAGACATTTTTCGGTCATGGTGACTTCCC
ACAACACACAGCGATATGCAAATATCGCGGGGTGTGCGCCTCCCTGCTCTCGTCCAGTCGTCTTCTCGCCAGGGC
GCACGCGCGCTGCGTGTTCCCGGCCTGTGACCCTGAGCCCGCGATTCCTGGGAGCGGGTTGATGACGTCAGCGTT
TGAACTCC
>H1_363-H1_364 (SEQ ID NO: 1275)
TGAAAGGGACTCCTCTCAAGCAGAGTTTATAAGGCTCCCATGTGTACAGCCATTTCTCGGTCATGGTAACTACCC
ACAACACACAGCGATATGCAAATATAGCAGAGAGTGTCTTCCCGCGCGCGCCTGGTCGTCTCGGCGCCGGCGCGC
TGCGTGGGGCGGAACTGTGACAGAGACCCTGCGATTCCTGGGAGCTGGCTGATGACGTCAGTGTCTAACCTCC
>H1_364-H1_361 (SEQ ID NO: 1276)
TGAAAGGGACTCCTCTCAAGCAGAGTTTATAAGGCTCCCATGTGTACAGCCATTTCTCGGTCATGGTAACTACCC
ACAACACACAGCGATATGCAAATATAGCAGAGAGTGTCTTCCCGCGCGCGCCTGGTCGTCTCGGCGCCGGCGCGC
TGCGTGGGGCGGAACTGTGACAGAGACCCTGCGATTCCTGGGAGCTGGCTGATGACATCAGTGTCTAACCTCC
>H1_365-H1_366 (SEQ ID NO: 1277)
TGAGGGAAGATAAGCTCAAGCAGAACTTATAAGGCTCCCAAATGTACAGACATTTATCGGTCATGGTAACTACCC
ACAACACACAGCGATATGCAAATATAGCAGAGCGTGCCTCCTGCACGGGCCGGTCGTCTTCTCGCCGGAGCGCAG
GCGCGCTGCGTGGTGCGGGACTGTGACCCTGAGCCTGCGATTCCTGGGAGCGGGCTGATGACGTCAGCGTCTGAG
CTCC
>H1_369-H1_396 (SEQ ID NO: 1278)
TGGGAGAAAGTGGGCTGAAGCAGGACTTATAAGGCTCCCAAATCTAAAGACATTTTTTGGTCATGGTGACTTCCC
ACAACACACAGCGTCATGCAAATATCATGGGGTGTGCGCCTCCCTGCTCCCGTCCAGTCGTCTTCTCGCCAGGGC
GCACGCGCGCTGCGTGTTCCCGGCCTGTGACCCTGAGCCCGCGATTGCTGGGAGCGAGTTGATGACGTCAGCGTT
TGAACTCC
>H1_371-H1_372 (SEQ ID NO: 1279)
TGGGGAAAGCTGGGCTCAAGCAGAGCTTATAAGGCTCTCGTACCTAAAGACATTTCACGGTCATGGTGACTACCC
ACAACACACAGCGACATGCAAATTTCGTGGAGTGTGCCTCCCTCCGCTTGTCCCGCGTCTTTTCTCTCCCGGGCG
CACGCGCGCACGCACGCGACGCGTTCCCGCCACAGCGCCCCCGCGGTTCCTGGGAGCGGGTTGATGACGTCAGCA
TTTGGACGCC
>H1_374-H1_373 (SEQ ID NO: 1280)
TGAAAGAAACTAGCCACAAACGGAAACTATAAGAGGTCCAAAGCTCAGTGTACTCTATGGTTAGGGTGACTTCCC
ACAATACATAGCGATATGCAGATTTCTTCCCCAATCTGGCCCGCCGGGCCCTCCCTAGAGCGCATGCGCTGCAGG
TCCACGGCAGAGCACTGGGCGGGCGATCCCGGGAGCGGGTTGATGACGTCAGCGTTTGAACTCC
>H1_374-H1_375 (SEQ ID NO: 1281)
TGAAAGAAACTAGCCACAAACGGAAACTATAAGAGGTCCAAAGCTCAGTGTACTCTATGGTTAGGGTGACTTCCC
ACAATACATAGCGATATGCAGATTTCTTCCCCAGTCTGGCCCGCTGGGCCCTCCCTAGAGCGCATGCGCTGCAGG
TCCACGGCAGAGCACTGGGCGGGCGATCCCGGGAGCGGGTTGATGACGTCAGCGTTTGAACTCC
>H1_374-H1_376 (SEQ ID NO: 1282)
TGAAAGAAACTAGTTACAAACGGAAACTATAAGAGGTCCAAAGCTCAGTGTACTTTATGGTCAGGGTGACTTCCC
ACAATACATAGCGATATGTAGATTTCTTCCCCGATCTGGGCCCGCCGGGTCCTCCCTAGAGCGCATGCGCTGCAG
GTCCACGGCAGAGGACTGGGCGGGCGATTCCCGGGAGCGGGTTGATGACGTCAGCGTTTGAACTCC
>H1_374-H1_391 (SEQ ID NO: 1283)
TGAGAGAAAATGGTTTGAAGCAGAACTTATAAGAATCCCAAATCTCAGTATATTTTTTGGTCATGGTGACTTCCC
ACAATACACAGCGATATGTAGATATCGCGGGGAGCACCTCCCAGTTCTGGTCCAGTCGGCTCCTCGCTAGGGCGC
ACGCGTACTAGCGCGCTGCATGGTTCCCGGCCTGTGACAGTGCCTGAGCCCGCGATTTCCTGGGAGCGAGTTGAT
GACGTCAGCGTTTGAACTCC
>H1_374-H1_392 (SEQ ID NO: 1284)
TGAAAGAAACTGGTTTCAAACGGAAACTATAAGAGGTCCAAATCTCAGTATACTTTTTGGTCAGGGTGACTTCCC
ACAATACACAGCGATATGTAGATTTCCTCCCCGATCTGGTCCCGTCGGCTCCTCGCTAGGGCGCATGCGCTGCAG
GTCCCCGGCCTATGACTGGGCCGGCGATTTCCCGGGAGCGAGTTGATGACGTCAGCGTTTGAACTCC
>H1_377-H1_378 (SEQ ID NO: 1285)
TGAAAAAAAAGGTTTCAAAGCTACACTTATAAGGCTCCCAAATGTCAGTATATTTTTTGGTCACGGTGACTTCCC
ACAATGCATAGCGATATGTAGATATTGCGAGGAGTACCTCCCAGTTCTGGTCCTGTCAGCTCTTTGCTAGGACGC
ACGCGCTGCAGGTTCCCAGCCTGTGATTGGGCCAGCGATTCCGGGAGCGAATTGATGACGTCAGCGTTTGAACTC
C
>H1_377-H1_380 (SEQ ID NO: 1286)
TGAAAAAAAAGGTTTCAAAGCTACACTTATAAGGCTCCCAAATCTCAGTATATTTTTTGGTCACGGTGACTTCCC
ACAATGCATAGCGATATGTAGATATTGCGAGGAGTACCTCCCAGTTCTGGTCCTGTCAGCTCTTTGCTAGGACGC
ACGCGCTGCAGGTTCCCAGCCTGTGATTGGGCCAGCGATTCCGGGAGCGAATTGATGACGTCAGCGTTTGAACTC
C
>H1_383-H1_377 (SEQ ID NO: 1287)
TGAAAGAAAAGGTTTCAAAGCTACACTTATAAGGATCCCAAATCTCAGTATATTTTTTGGTCACGGTGACTTCCC
ACAATACACAGCGATATGTAGATATCGCGAGGAGTACCTCCCAGTTCTGGTCCTGTCAGCTCTTTGCTAGGGCGC
ACGCGCTGCAGGTTCACAGCCTGTGATTGGGCCCGCGATTCCGGGAGCGAATTGATGACGTCAGCGTTTGAACTC
C
>H1_383-H1_384 (SEQ ID NO: 1288)
TGAAAGAAAAGGTTTCAAAGCTACACTTATAAGGATCCCAAATCTCAGTATATTTTTTGGTCACGGTGACTTCCC
ACAAGACACAGCGATATGTAGATATCGCGAGGAGTACCTCCCAGTTCTGGTCCTGTCAGCTCTTTGCTAGGGCGC
ACGCGCTGCAGGTTCACAGCCTGTGATTGGGCCCGCGATTCCGGGAGCGAATTGATGACGTCAGCGTTTGAACTC
C
>H1_386-H1_383 (SEQ ID NO: 1289)
TGAAAGAAAAAGTTTTGAAGCAGAACTTATAAGAATCCCAAATCTCAGTATATTTTTTGGTCATGGTGACTTCCC
ACAATACACAGCGATATGTAGATATCGCGAGGAGCACCTCCCAGTTCTGGTCCTGTCAGCTCCTCGCTAGGGCGC
ACGCGCGCTGCATGGTTCACAGCCTGTGACCCTGGGCCCGCGATTCCTGGGAGCGAGTTGATGACGTCAGCGTTT
GAACTCC
>H1_386-H1_385 (SEQ ID NO: 1290)
TGAAAGCAAAAGTTTTGAAGCAGAACTTATAAGAAGCCCAAATCTCAGTATATTTTTTGGTCATGGTGACTTCCC
ACAATACACAGCGATATGTAGATATCGCGAGGAGCACCTCCCAGTTCTGGTCCTGTCAGCTCCTCACTAGGGCGC
ATGCGCGCTGCATGGTTCACAGCCTGTGACCCTGGGCCTGCGATTCCTGGGAGCGAGTTGATGACGTCAGCGTTT
GAACTCC
>H1_386-H1_387 (SEQ ID NO: 1291)
TGAAAGCAAAAGTTTTGAAGCAGAACTTATAAGAAGCCCAAATCTCAGTATATTTTTTGGTCATGGTGACTTCCC
ACAATACACAGCGATATGTAGATATCGCGAGGAGCACCTCCCAGTTCTGGTCCTGTCAGCTCCTCACTAGGGCGC
ATGCGCTGCAGGTTCACAGCCTGTGACTGGGCCTGCGATTCCTGGGAGCGAGTTGATGACGTCAGCGTTTGAACT
CC
>H1_388-H1_386 (SEQ ID NO: 1292)
TGAGAGAAAATGTTTTGAAGCAGAACTTATAAGAATCCCAAATCTCAGTATATTTTTTGGTCATGGTGACTTCCC
ACAATACACAGCGATATGTAGATATCGCGGGGAGCACCTCCCAGTTCTGGTCCAGTCGGCTCCTCGCTAGGGCGC
ACGCGTACTAGCGCGCTGCATGGTTCCCGGCCTGTGACAGTGCCTGAGCCCGCGATTCCTGGGAGCGAGTTGATG
ACGTCAGCGTTTGAACTCC
>H1_388-H1_390 (SEQ ID NO: 1293)
TGAGAGAAAATGTTTTGAAGCAGAACTTATAAGAATCCCAAATCTCAGTATATTTTTTGGTCATGGTGACTTCCC
ACAATACACAGCGATATGTAGATATGGTGGGGAGCACCTCCCAGTTCTGGCCCAGTCGGCTCCTCGCTAGGGCGC
ACGCGTACTAGCGCGCTGCGGGTTCCCGGCCTGTGACAGTGCCTGAGCCCGCGATTCCTGGGAGCGAGTTGATGA
CGTCAGCGTTTGAACTCC
>H1_388-H1_393 (SEQ ID NO: 1294)
TAAGAGAAAGTTTTTTGAAGCAGAACTTATAAGGATCCCAAAACTCAGTATATTTTTTGGTCATGGTGACTTCCC
ACAATACACAGCGATATGTAGATATGGTGGGGAGCACCTCCCAGTTCTGGCCCAGTCGGCTCCTCGCTAGGGCGC
ACGCGTACTAGCGCGCTGCGGGTTCCCGGCCTGTGACAGTGCCTGAGCCCGCGATTCCTGGGAGCGAGTTGATGA
CGTCAGCGTTTGAACTCC
>H1_391-H1_388 (SEQ ID NO: 1295)
TGAGAGAAAATGGTTTGAAGCAGAACTTATAAGAATCCCAAATCTCAGTATATTTTTTGGTCATGGTGACTTCCC
ACAATACACAGCGATATGTAGATATCGCGGGGAGCACCTCCCAGTTCTGGTCCAGTCGGCTCCTCGCTAGGGCGC
ACGCGTACTAGCGCGCTGCATGGTTCCCGGCCTGTGACAGTGCCTGAGCCCGCGATTCCTGGGAGCGAGTTGATG
ACGTCAGCGTTTGAACTCC
>H1_393-H1_394 (SEQ ID NO: 1296)
TAAGAGAAAGCTTTCTGAACCAGAGCTTATAAAGATCCCAAAACTCAGGCTATATTTTGGTCATGGTGACTTCCC
ACAATACACAGCGATATGTAGATATAGTGGGGAGCACCTCCCAGTTCTGGCCCAGTCGGGTCCTCTCTAGGGCGC
ACGCGCGCTGCGGGTTCCCGGCCTGTGACAGTGCCTGAGCCCGCGATTCCTGGGAGCGAGTTGACGTCACCGTTT
GAACTTC
>H1_395-H1_369 (SEQ ID NO: 1297)
TGGGAGAAAGTGGGCTGAAGCAGAACTTATAAGGCTCCCAAATCTAAAGACATTTTTCGGTCATGGTGACTTCCC
ACAACACACAGCGATATGCAAATATCATGGGGTGTGCGCCTCCCTGCTCTCGTCCAGTCGTCTTCTCGCCAGGGC
GCACGCGCGCTGCGTGTTCCCGGCCTGTGACCCTGAGCCCGCGATTGCTGGGAGCGAGTTGATGACGTCAGCGTT
TGAACTCC
>H1_398-H1_357 (SEQ ID NO: 1298)
TGGGAAAAAGTGGGGCTCAAGCAGAATTTATAAGGCTCCCAAACCTAAAGACATTTTACGGTTATGGTGACTTCC
CACAACACACAGCGACATGCAAATATCGCGGGGTGTGCGGCCTCCCTGCTCTCGTCCAGGCGTCTTCTCGCCAGG
GCGCACGCGCGCACGCGCGCTGCGCTGTTCCCGCCCTGGTGACGGAGCCTGAGCCCGCGATTTCCTGGGAGCGGG
TTGATGACGTCAGCGTTTGGACTCC
>H1_398-H1_399 (SEQ ID NO: 1299)
CAGGAAAGACTGCGCTGAGGCAGACTTTATAAGGCTCCCGCGCAGAAAGAAACTTTATAGTTATGGTGATTTCCC
ACAAGCCACTGCGTCATGCAAATAAAGCAGGGTTGACGGCTTCCAAGTATGTACCTTAAGGTTTTTCTCTAGGCC
GCGTACGCTCTGCGTATTCAGCCACGTGACCCTGAGCCAGTGGTTGTTGGGAGCACGTTGTGGACCTCTGCGTTT
GGATTCC
>H1_398-H1_400 (SEQ ID NO: 1300)
CAGGAAAGAGTGGGGCTCAGGCAGACTTTATAAGGCTCCCAAACAGAAAGACACTTTACAGTTATGGTGACTTCC
CACAAGACACTGCGTCATGCAAATATCGCAGGGTTGGCGGCCTTCCTTCTATCTTCCTTAAGGTTTCTCTCTAGG
GCGCGTACGCGCTGCGTATTCCCGCCCCGGTGACCCTGAGCCAGTGGTTGTTGGGAGCACGTTGATGACGTCTGC
GTTTGGATTCC
>H1_402-H1_403 (SEQ ID NO: 1301)
TGGGGAGTGGCCGCCTAGGGGGCGATATATAAGGCTCACAAAACCCGTGCTATTTCTTACAGAGGGTGAATATCC
CCATGATCCTCGGCGGCATGCAAATAATAGTTGCGTCAGAGTAGAGCGCAGCCTGCCGGTCTCTCCTAGCGCGGG
AAATCCTGTTTTCTTCTTCAGTCCCGGTGACGAGGACGCGCGCGCGCACCGTAGCCGGACAACGGTCTGGTAAGG
TAGGCGGGATTCGGTTGAGAGCGCC
>H1_403-H1_404 (SEQ ID NO: 1302)
CGTGGAATCCCCGCCTAGGGGGCGCTATATAAGGCTCACCAAACCCGTGCTATTTCTTACAGAGGGTGAATATCC
CATGATCCTTGGCGGCATGCAAATAACAGCTTGCGTCAGAGTAGAGCGCAGCCTACCAGTCTTTCCTAGCGCGGG
AAATCCCGTTTTCTTCTGAGGTCGCCGGTGACGCGCGCGTGCGCCGTAGCCAGAGAACGGTCCGGGAAGGTAGGC
CGGCCGGGATTCGGTTGAGAGCGCC
>H1_407-H1_408 (SEQ ID NO: 1303)
TGGGACAAAAAACTCTTGGTCACATTATATAAGAATCCCATATCTAAAGACATTTCAGGGTTAGGGTGACTTCCC
CAACAATACATAGCGACATGCAAATATCATGGTCCTTCCAGGAGGCGTGCCTCCCCGTCCCCTTGGTCCAGGTCT
TGCTGGGGCGCACGCGCGCTGCGTGTTCCCGCTCTGTGACTCTCAGCTCGCGATTCCTGAGAGCGGATTGGTGAA
GTCAATGTTCTGGCTCC
>FIG. 17 Consensus Sequence (SEQ ID NO: 1868)
TGAGCTTCCCTCCGCCCTATGRGRAARRGTGGTYCYAYNCAGAACTTATAAGRYTCCCAWAYYYAAAGACATTTC
WCGWTTATGGTGAYTTCCCAGAABACAYAGCGACATGCAAATATTGYAGGGCGTSMCWCCCCTGTCCCTNACRGY
CRTCTTCCTGCCAGGGCGCACGCGCGCTGSGTGTTCCCGCSTAGTGACDCTGGGCCCGCGATTCCTTGGAGCGGG
TTGATGACGTCAGCGTTCGAATTCCATGGCG

The application's sequence listing, which the Patent Office published only in electronic form, follows.

SEQUENCE LISTING (1920 sequences)

SEQ ID NO: 1 - DNA, 4443 bp, Homo sapiens
atgcagaggtcgcctctggaaaaggccagcgttgtctccaaactttttttcagctggaccagaccaattttgaggaaaggatacagacagcgcctggaattgtcagacatataccaaatcccttctgttgattctgctgacaatctatctgaaaaattggaaagagaatgggatagagagctggcttcaaagaaaaatcctaaactcattaatgcccttcggcgatgttttttctggagatttatgttctatggaatctttttatatttaggggaagtcaccaaagcagtacagcctctcttactgggaagaatcatagcttcctatgacccggataacaaggaggaacgctctatcgcgatttatctaggcataggcttatgccttctctttattgtgaggacactgctcctacacccagccatttttggccttcatcacattggaatgcagatgagaatagctatgtttagtttgatttataagaagactttaaagctgtcaagccgtgttctagataaaataagtattggacaacttgttagtctcctttccaacaacctgaacaaatttgatgaaggacttgcattggcacatttcgtgtggatcgctcctttgcaagtggcactcctcatggggctaatctgggagttgttacaggcgtctgccttctgtggacttggtttcctgatagtccttgccctttttcaggctgggctagggagaatgatgatgaagtacagagatcagagagctgggaagatcagtgaaagacttgtgattacctcagaaatgattgaaaatatccaatctgttaaggcatactgctgggaagaagcaatggaaaaaatgattgaaaacttaagacaaacagaactgaaactgactcggaaggcagcctatgtgagatacttcaatagctcagccttcttcttctcagggttctttgtggtgtttttatctgtgcttccctatgcactaatcaaaggaatcatcctccggaaaatattcaccaccatctcattctgcattgttctgcgcatggcggtcactcggcaatttccctgggctgtacaaacatggtatgactctcttggagcaataaacaaaatacaggatttcttacaaaagcaagaatataagacattggaatataacttaacgactacagaagtagtgatggagaatgtaacagccttctgggaggagggatttggggaattatttgagaaagcaaaacaaaacaataacaatagaaaaacttctaatggtgatgacagcctcttcttcagtaatttctcacttcttggtactcctgtcctgaaagatattaatttcaagatagaaagaggacagttgttggcggttgctggatccactggagcaggcaagacttcacttctaatggtgattatgggagaactggagccttcagagggtaaaattaagcacagtggaagaatttcattctgttctcagttttcctggattatgcctggcaccattaaagaaaatatcatctttggtgtttcctatgatgaatatagatacagaagcgtcatcaaagcatgccaactagaagaggacatctccaagtttgcagagaaagacaatatagttcttggagaaggtggaatcacactgagtggaggtcaacgagcaagaatttctttagcaagagcagtatacaaagatgctgatttgtatttattagactctccttttggatacctagatgttttaacagaaaaagaaatatttgaaagctgtgtctgtaaactgatggctaacaaaactaggattttggtcacttctaaaatggaacatttaaagaaagctgacaaaatattaattttgcatgaaggtagcagctatttttatgggacattttcagaactccaaaatctacagccagactttagctcaaaactcatgggatgtgattctttcgaccaatttagtgcagaaagaagaaattcaatcctaactgagaccttacaccgtttctcattagaaggagatgctcctgtctcctggacagaaacaaaaaaacaatcttttaaacagactggagagtttggggaaaaaaggaagaattctattctcaatccaatcaactctatacgaaaattttccattgtgcaaaagactcccttacaaatgaatggcatcgaagaggattctgatgagcctttagagagaaggctgtccttagtaccagattctgagcagggagaggcgatactgcctcgcatcagcgtgatcagcactggccccacgcttcaggcacgaaggaggcagtctgtcctgaacctgatgacacactcagttaaccaaggtcagaacattcaccgaaagacaacagcatccacacgaaaagtgtcactggcccctcaggcaaacttgactgaactggatatatattcaagaaggttatctcaagaaactggcttggaaataagtgaagaaattaacgaagaagacttaaaggagtgcttttttgatgatatggagagcataccagcagtgactacatggaacacataccttcgatatattactgtccacaagagcttaatttttgtgctaatttggtgcttagtaatttttctggcagaggtggctgcttctttggttgtgctgtggctccttggaaacactcctcttcaagacaaagggaatagtactcatagtagaaataacagctatgcagtgattatcaccagcaccagttcgtattatgtgttttacatttacgtgggagtagccgacactttgcttgctatgggattcttcagaggtctaccactggtgcatactctaatcacagtgtcgaaaattttacaccacaaaatgttacattctgttcttcaagcacctatgtcaaccctcaacacgttgaaagcaggtgggattcttaatagattctccaaagatatagcaattttggatgaccttctgcctcttaccatatttgacttcatccagttgttattaattgtgattggagctatagcagttgtcgcagttttacaaccctacatctttgttgcaacagtgccagtgatagtggcttttattatgttgagagcatatttcctccaaacctcacagcaactcaaacaactggaatctgaaggcaggagtccaattttcactcatcttgttacaagcttaaaaggactatggacacttcgtgccttcggacggcagccttactttgaaactctgttccacaaagctctgaatttacatactgccaactggttcttgtacctgtcaacactgcgctggttccaaatgagaatagaaatgatttttgtcatcttcttcattgctgttaccttcatttccattttaacaacaggagaaggagaaggaagagttggtattatcctgactttagccatgaatatcatgagtacattgcagtgggctgtaaactccagcatagatgtggatagcttgatgcgatctgtgagccgagtctttaagttcattgacatgccaacagaaggtaaacctaccaagtcaaccaaaccatacaagaatggccaactctcgaaagttatgattattgagaattcacacgtgaagaaagatgacatctggccctcagggggccaaatgactgtcaaagatctcacagcaaaatacacagaaggtggaaatgccatattagagaacatttccttctcaataagtcctggccagagggtgggcctcttgggaagaactggatcagggaagagtactttgttatcagcttttttgagactactgaacactgaaggagaaatccagatcgatggtgtgtcttgggattcaataactttgcaacagtggaggaaagcctttggagtgataccacagaaagtatttattttttctggaacatttagaaaaaacttggatccctatgaacagtggagtgatcaagaaatatggaaagttgcagatgaggttgggctcagatctgtgatagaacagtttcctgggaagcttgactttgtccttgtggatgggggctgtgtcctaagccatggccacaagcagttgatgtgcttggctagatctgttctcagtaaggcgaagatcttgctgcttgatgaacccagtgctcatttggatccagtaacataccaaataattagaagaactctaaaacaagcatttgctgattgcacagtaattctctgtgaacacaggatagaagcaatgctggaatgccaacaatttttggtcatagaagagaacaaagtgcggcagtacgattccatccagaaactgctgaacgagaggagcctcttccggcaagccatcagcccctccgacagggtgaagctctttccccaccggaactcaagcaagtgcaagtctaagccccagattgctgctctgaaagaggagacagaagaagaggtgcaagatacaaggctttag

SEQ ID NO: 2 - DNA, 4287 bp, Artificial Sequence
  Description of Artificial Sequence: Synthetic polynucleotide
atgcagaggtcgcctctggaaaaggccagcgttgtctccaaactttttttcagctggaccagaccaattttgaggaaaggatacagacagcgcctggaattgtcagacatataccaaatcccttctgttgattctgctgacaatctatctgaaaaattggaaagagaatgggatagagagctggcttcaaagaaaaatcctaaactcattaatgcccttcggcgatgttttttctggagatttatgttctatggaatctttttatatttaggggaagtcaccaaagcagtacagcctctcttactgggaagaatcatagcttcctatgacccggataacaaggaggaacgctctatcgcgatttatctaggcataggcttatgccttctctttattgtgaggacactgctcctacacccagccatttttggccttcatcacattggaatgcagatgagaatagctatgtttagtttgatttataagaagactttaaagctgtcaagccgtgttctagataaaataagtattggacaacttgttagtctcctttccaacaacctgaacaaatttgatgaaggacttgcattggcacatttcgtgtggatcgctcctttgcaagtggcactcctcatggggctaatctgggagttgttacaggcgtctgccttctgtggacttggtttcctgatagtccttgccctttttcaggctgggctagggagaatgatgatgaagtacagagatcagagagctgggaagatcagtgaaagacttgtgattacctcagaaatgatcgagaacatccaatctgttaaggcatactgctgggaagaagcaatggaaaaaatgattgaaaacttaagacaaacagaactgaaactgactcggaaggcagcctatgtgagatacttcaatagctcagccttcttcttctcagggttctttgtggtgtttttatctgtgcttccctatgcactaatcaaaggaatcatcctccggaaaatattcaccaccatctcattctgcattgttctgcgcatggcggtcactcggcaatttccctgggctgtacaaacatggtatgactctcttggagcaataaacaaaatacaggatttcttacaaaagcaagaatataagacattggaatataacttaacgactacagaagtagtgatggagaatgtaacagccttctgggaggagggatttggggaattatttgagaaagcaaaacaaaacaataacaatagaaaaacttctaatggtgatgacagcctcttcttcagtaatttctcacttcttggtactcctgtcctgaaagatattaatttcaagatagaaagaggacagttgttggcggttgctggatccactggagcaggcaagacttcacttctaatgatgattatgggagaactggagccttcagagggtaaaattaagcacagtggaagaatttcattctgttctcagttttcctggattatgcctggcaccattaaagaaaatatcatctttggtgtttcctatgatgaatatagatacagaagcgtcatcaaagcatgccaactagaagaggacatctccaagtttgcagagaaagacaatatagttcttggagaaggtggaatcacactgagtggaggtcaacgagcaagaatttctttagcaagagcagtatacaaagatgctgatttgtatttattagactctccttttggatacctagatgttttaacagaaaaagaaatatttgaaagctgtgtctgtaaactgatggctaacaaaactaggattttggtcacttctaaaatggaacatttaaagaaagctgacaaaatattaattttgcatgaaggtagcagctatttttatgggacattttcagaactccaaaatctacagccagactttagctcaaaactcatgggatgtgattctttcgaccaatttagtgcagaaagaagaaattcaatcctaactgagaccttacaccgtttctcattagaaggagatgctcctgtctcctggacagaaacaaaaaaacaatcttttaaacagactggagagtttggggaaaaaaggaagaattctattctcaatccaatcaactctacgcttcaggcacgaaggaggcagtctgtcctgaacctgatgacacactcagttaaccaaggtcagaacattcaccgaaagacaacagcatccacacgaaaagtgtcactggcccctcaggcaaacttgactgaactggatatatattcaagaaggttatctcaagaaactggcttggaaataagtgaagaaattaacgaagaagacttaaaggagtgcctttttgatgatatggagagcataccagcagtgactacatggaacacataccttcgatatattactgtccacaagagcttaatttttgtgctaatttggtgcttagtaatttttctggcagaggtggctgcttctttggttgtgctgtggctccttggaaacactcctcttcaagacaaagggaatagtactcatagtagaaataacagctatgcagtgattatcaccagcaccagttcgtattatgtgttttacatttacgtgggagtagccgacactttgcttgctatgggattcttcagaggtctaccactggtgcatactctaatcacagtgtcgaaaattttacaccacaaaatgttacattctgttcttcaagcacctatgtcaaccctcaacacgttgaaagcaggtgggattcttaatagattctccaaagatatagcaattttggatgaccttctgcctcttaccatatttgacttcatccagttgttattaattgtgattggagctatagcagttgtcgcagttttacaaccctacatctttgttgcaacagtgccagtgatagtggcttttattatgttgagagcatatttcctccaaacctcacagcaactcaaacaactggaatctgaaggcaggagtccaattttcactcatcttgttacaagcttaaaaggactatggacacttcgtgccttcggacggcagccttactttgaaactctgttccacaaagctctgaatttacatactgccaactggttcttgtacctgtcaacactgcgctggttccaaatgagaatagaaatgatttttgtcatcttcttcattgctgttaccttcatttccattttaacaacaggagaaggagaaggaagagttggtattatcctgactttagccatgaatatcatgagtacattgcagtgggctgtaaactccagcatagatgtggatagcttgatgcgatctgtgagccgagtctttaagttcattgacatgccaacagaaggtaaacctaccaagtcaaccaaaccatacaagaatggccaactctcgaaagttatgattattgagaattcacacgtgaagaaagatgacatctggccctcagggggccaaatgactgtcaaagatctcacagcaaaatacacagaaggtggaaatgccatattagagaacatttccttctcaataagtcctggccagagggtgggcctcttgggaagaactggatcagggaagagtactttgttatcagcttttttgagactactgaacactgaaggagaaatccagatcgatggtgtgtcttgggattcaataactttgcaacagtggaggaaagcctttggagtgataccacagaaagtatttattttttctggaacatttagaaaaaacttggatccctatgaacagtggagtgatcaagaaatatggaaagttgcagatgaggttgggctcagatctgtgatagaacagtttcctgggaagcttgactttgtccttgtggatgggggctgtgtcctaagccatggccacaagcagttgatgtgcttggctagatctgttctcagtaaggcgaagatcttgctgcttgatgaacccagtgctcatttggatccagtaacataccaaataattagaagaactctaaaacaagcatttgctgattgcacagtaattctctgtgaacacaggatagaagcaatgctggaatgccaacaatttttggtcatagaagagaacaaagtgcggcagtacgattccatccagaaactgctgaacgagaggagcctcttccggcaagccatcagcccctccgacagggtgaagctctttccccaccggaactcaagcaagtgcaagtctaagccccagattgctgctctgaaagaggagacagaagaagaggtgcaagatacaaggctttag

SEQ ID NO: 3 - DNA, 4443 bp, Artificial Sequence
  Description of Artificial Sequence: Synthetic polynucleotide
atgcagcggtcaccccttgagaaggcatcggtcgtgtccaagctgttcttcagctggacacgaccgatccttcgcaaggggtaccgccagcgcttggagctgtctgatatctatcagattccaagcgtggacagcgctgataacctctccgagaagttagagagagagtgggaccgtgaactcgccagcaagaagaacccaaagctgatcaatgctttgcggcgctgcttcttctggcggttcatgttctacggcatctttctctatctcggagaggttaccaaggctgtccagccgctcctgctggggcggataattgcgagctacgatcctgatgcgaaggaggagcgctcgatcgccatttatctgggcatcgggctctgcctattattcatcgtgaggacgttgctcctgcacccggcgatcttcggtctgcaccacatcgggatgcagatgaggatcgccatgttttctttgatctataagaagacattgaagttgtcgagccgggtcctcgacaaaattagcatagggcagctggtcagtcttctgtcagctgccctagctaagtttgacgagggcctggctctggcacacttcgtgtggatcgcgccgctgcaagtggcgctgctgatgggcctgatatgggagctcttgcaggcgagcgcgttctgtggcctggggtttctcatcgtcctggccttgttccaggcaggccttggacggatgatgatgaagtatcgcgatcagcgcgctggtaagatcagcgagcggctggtcattaccagcgagatgatcgagaacattcagtccgtcaaggcctactgctgggaggaggccatggagaagatgatagaagccctcaggcagacagagctgaagctcacccgcaaggctgcctatgtcaggtacttcaacagcagcgccttctttttcagcggcttctttgtggtcttcttgtcagtgctaccgtacgcgttgataaaggggatcatcttgaggaagatcttcacgacgatctccttttgcatcgtgttgcggatggcagtgacaagacagtttccatgggccgtccagacttggtacgacagtctgggcgccattgcgaaaattcaggatttcctgcagaagcaggaatacaagaccctcgaatacgccctcacgaccacggaggtggtgatggagaacgtcaccgccttctgggaggagggcttcggggagctgttcgagaaggccaagcaggccaacgcgaacaggaaaacgtcgaacggggatgattccctgttcttcagcaacttcagcttgctgggcacgccggtcttgaaggacatcaacttcaagatcgagcgtggccagctgctggcagttgctggaagcacgggtgcaggaaagacgtccttactgatggttataatgggcgagctcgagcccagtgaaggcaagatcaagcactccggtcgcatcagtttctgctcgcaattttcatggatcatgccaggtaccatcaaggagaacatcatctttggtgtctcctatgatgagtaccgctatcgcagcgtcatcaaggcttgccagctggaggaggacatcagcaagttcgcggagaaggataacatcgtcctgggggaagggggaattaccctcagtggaggacagagggctcgtatcagccttgctcgggcggtctataaggacgctgacctgtatctgctggattcgccgttcggctacttagacgtgctcacggagaaggagatcttcgagagctgcgtctgtaagctgatggcggcgaagacgcggatactggtcacgtccaagatggagcacctgaagaaggctgataagatcctcatcctccacgagggtagttcctacttctacgggacgttctccgagctccagaacttgcagcctgacttcagcagcaagctgatgggctgcgatagctttgatcagttctccgctgagcgccgaaactccattctgactgagactctgcaccgcttctctctggaaggagacgccccggtctcctggacagagacgaagaagcagagtttcaagcagactggagagttcggcgagaagcggaagaactcgatcctgaatccaatcgcctctatccggaagttcagcattgtccagaagacgccgttgcagatgaacggcatcgaggaggacagtgatgaacctctggagaggcgattgtcccttgttccggactcggaacaaggggaggcgatcttgccgcggatttcggtgattagcactggccctacgctacaggcgaggcgtcgtcagagcgtgctggctctgatgacgcactcggtagcgcagggccaggctattcaccgaaagacgacggcaagtacgcgtaaagtgagcctggctcctcaggcggcgctgactgagttggacatctacagtcggcgcctgtctcaggagaccgggctcgagataagtgaggagatagcagaggaggacctcaaggagtgcttctttgatgatatggagagtatccccgcggtgaccacgtgggcgacttacctccgttacatcacggtgcacaagtccttgatctttgtcctcatctggtgtctcgtcatttttctcgccgaggtagccgcgagcctggtggttctgtggctcctcggcgcgaccccgctccaggacaaggggaacagcacccactcgagaaacgcatcgtatgcagtgattatcacgtccacctcctcgtattatgtattctacatatacgtgggggtggcggatacactgcttgcgatgggtttctttagggggctgccccttgtccatacgctgattactgtcagcaagattctgcatcacaagatgctccacagtgtcctgcaggcgcctatgtcaacgttggctacgttgaaggcgggcgggatactgaacaggttctcaaaggacatagcgatcttggatgatctcttgcctttgaccatttttgactttatccagctgctgctgatcgtgataggggccatcgcggtcgtcgcggtgctgcagccatatatctttgtggctacagtacccgtgatcgtggcctttatcatgcttcgggcttacttccttcagacttcccagcagctgaagcagctggagtctgaaggaagaagcccgatttttacgcatctggtaaccagcttgaaggggctgtggacattgcgggcattcgggcggcagccgtattttgagaccttgttccacaaggctctcaatttgcacactgccgcctggttcctgtatttgtccacgctccgctggttccagatgcgtatcgagatgatcttcgtgatcttcttcatcgccgtcaccttcatcagtattctgacgactggtgagggcgaggggagggtcgggatcatcttgacgctcgcgatgaacatcatgagcacgctccagtgggctgtcgcgtcgagcatcgacgtcgacagcctcatgcggagcgtgtctcgtgtgttcaagttcatcgatatgccgaccgagggaaagccgaccaagagtacgaagccgtacaagaacggtcagctttccaaggtcatgattatcgagaactcccacgtgaagaaggacgacatctggccttctgggggacagatgaccgtgaaggaccttaccgccaagtatactgaggggggtaatgctatcctggaggccatatcgttctcgatctcccccggtcagcgcgtggggctgctggggcggacagggagtggtaagtccactctcctgtccgccttcctgcggctcctcgcgactgagggggagatccagatcgatggggtctcctgggatagcattaccctccagcagtggcggaaggccttcggggtcatcccccagaaggtcttcatcttcagtgggacgtttcgtaaggcgttggacccttacgaacagtggtcggatcaagagatatggaaggtcgccgacgaggtgggtcttcgctccgttattgagcagtttccgggcaagctagacttcgtcttagttgacggtggctgtgtgttgtcacacggccacaagcagctgatgtgtctagctcgctcggtgctcagtaaagcgaagatcctcttgttggacgagccttccgcccatcttgatccggtcacttatcagatcatcaggcggacactcaagcaggcctttgcggattgcacagtgattctgtgcgagcaccgcatagaggccatgcttgagtgtcagcagtttctggtgatcgaggaggctaaggtccgccagtatgattcgatccagaagttactggcggagcgtagcctcttccgacaggcgatctcgccgtcggatagagtcaagctgtttcctcaccgggcctcctcgaagtgtaagtcaaagccgcagattgcggctttgaaggaggagactgaggaggaggtccaggacacgcggctctaa

SEQ ID NO: 4 - DNA, 4443 bp, Artificial Sequence
  Description of Artificial Sequence: Synthetic polynucleotide
atgcagcggtcaccccttgagaaggcatcggtcgtgtccaagctgttcttcagctggacacgaccgatccttcgcaaggggtaccgccagcgcttggagctgtctgatatctatcagattccaagcgtggacagcgctgataacctctccgagaagttagagagagagtgggaccgtgaactcgccagcaagaagaacccaaagctgatcaatgctttgcggcgctgcttcttctggcggttcatgttctacggcatctttctctatctcggagaggttaccaaggctgtccagccgctcctgctggggcggataattgcgagctacgatcctgatgcgaaggaggagcgctcgatcgccatttatctgggcatcgggctctgcctattattcatcgtgaggacgttgctcctgcacccggcgatcttcggtctgcaccacatcgggatgcagatgaggatcgccatgttttctttgatctataagaagacattgaagttgtcgagccgggtcctcgacaaaattagcatagggcagctggtcagtcttctgtcagctgccctagctaagtttgacgagggcctggctctggcacacttcgtgtggatcgcgccgctgcaagtggcgctgctgatgggcctgatatgggagctcttgcaggcgagcgcgttctgtggcctggggtttctcatcgtcctggccttgttccaggcaggccttggacggatgatgatgaagtatcgcgatcagcgcgctggtaagatcagcgagcggctggtcattaccagcgagatgatcgagaacattcagtccgtcaaggcctactgctgggaggaggccatggagaagatgatagaagccctcaggcagacagagctgaagctcacccgcaaggctgcctatgtcaggtacttcaacagcagcgccttctttttcagcggcttctttgtggtcttcttgtcagtgctaccgtacgcgttgataaaggggatcatcttgaggaagatcttcacgacgatctccttttgcatcgtgttgcggatggcagtgacaagacagtttccatgggccgtccagacttggtacgacagtctgggcgccattgcgaaaattcaggatttcctgcagaagcaggaatacaagaccctcgaatacgccctcacgaccacggaggtggtgatggagaacgtcaccgccttctgggaggagggcttcggggagctgttcgagaaggccaagcaggccaacgcgaacaggaaaacgtcgaacggggatgattccctgttcttcagcaacttcagcttgctgggcacgccggtcttgaaggacatcaacttcaagatcgagcgtggccagctgctggcagttgctggaagcacgggtgcaggaaagacgtccttactgatggttataatgggcgagctcgagcccagtgaaggcaagatcaagcactccggtcgcatcagtttctgctcgcaattctcatggatcatgcccggtaccatcaaggagaacatcatctttggtgtctcctatgatgagtaccggtatcgatccgtgattaaggcttgtcagctggaggaggatatctccaagttcgccgagaaggataacatcgttctcggcgaaggaggtatcaccctctctggtggccagagagcgcgtatttcgctggccagagctgtatacaaggacgcggatctctaccttctcgacagcccgttcggttatctggacgtgctgaccgagaaggagatattcgagtcctgtgtgtgcaagctcatggccgcgaagacgcgcattctggtcaccagtaaaatggagcatctgaagaaggccgataagatactgattctccacgaggggagttcgtatttttacggcactttttcagagctccaaaatcttcagcccgatttctccagtaagcttatgggctgcgattcgtttgatcagttctcagctgagcggcgcaactccattctgacggagaccttgcataggttttcgttagaaggagatgcgccggtcagctggactgagacgaagaagcagtcctttaagcagactggagaattcggggagaagaggaaaaattcgatactgaaccccattgcgagcattcgcaagttcagtatcgtgcagaagacgcctctccagatgaacggaatcgaggaggactcagacgagccgctggagcggcggctcagtctggtccccgattccgagcagggagaggcgattctgccacgcatcagcgtgatctccaccgggcctaccctgcaggcccggcggagacagagtgtcctagctctgatgacgcactctgtggcgcaagggcaggccatccatcgtaagacgaccgcgtctacgaggaaggtctcccttgcgccacaggctgcgttaacagagctggacatttattcgaggaggctctcccaggagaccggcttggagatctcggaggagatcgccgaggaggatctcaaggagtgcttcttcgacgatatggagagcataccagcagtgacgacgtgggcgacttatttacggtatattaccgtacataagtcgctcattttcgtcctgatctggtgtctcgtcatatttctggcggaggtcgcggcgtcgctggttgtgttgtggctgttgggtgctactcccctgcaggacaaggggaatagcacccacagccgcaacgccagctacgccgtgatcatcaccagcacaagctcttactatgtcttctacatctatgtcggggtggcggacacgctgctggccatgggtttcttccgtggcctgccgcttgtccacaccctgataacggtgtcgaagatattgcatcacaagatgctccattcagtgttgcaagcgccgatgtcgacgcttgcaacactgaaggcgggggggatcctcaaccggtttagcaaggacattgctatactggatgatctcctcccgctgactatctttgacttcatccagctgctgctgatcgtgatcggggcgatagccgtggtcgcggtcttgcagccgtacatcttcgtggccacagtccctgtgatagtggcgttcatcatgctgagggcgtacttccttcagacttcccagcagctgaagcagctggagtctgaaggaaggtcgcccatcttcacgcatttggtgacgtcactcaagggactgtggaccttgagggcgttcggcaggcagccgtatttcgagaccttgttccacaaggccttgaacctgcatacggctgcctggttcctctacctctccactctccggtggttccagatgaggatcgagatgatcttcgtgatattctttatcgcggtgaccttcatctcgatcctcaccaccggagagggagaggggagggtcgggatcatcctgaccctcgctatgaacatcatgagcacgctccagtgggctgtcgcgtcgagcatcgacgtcgacagcctcatgcggagcgtgtctcgtgtgttcaagttcatagatatgccgacggagggtaagcccactaaaagtacgaagccctacaagaacggccagctgtccaaggtgatgattatcgagaacagtcacgtcaagaaggacgacatctggccctcgggtgggcagatgacggtgaaggacctcactgccaagtacaccgagggcgggaacgccattcttgaggcgatctcgttctcgatatcacctggacagcgggtcggcttgttgggccgtactggtagtgggaagtcgaccctcctgtcggcatttcttcgccttctggccacagaaggcgaaatccagatcgatggggtgtcctgggattccataacgttgcagcagtggaggaaggccttcggggtgattccccagaaggtcttcatcttctctgggacgtttcggaaggccctggacccctacgagcagtggagcgaccaggagatctggaaggtcgcggacgaggtgggcctgcggagcgtcatagagcagttccctggaaagctcgacttcgtgctggtagacggcggttgtgtgctgtcccacggccacaagcagctgatgtgcctagcacgaagcgtgctttccaaggcgaagatactgctcttggacgagccgtcggcccacctcgaccccgtgacctaccagatcatccgtcgcacactcaagcaggcctttgcggattgcacagtgattctgtgcgagcaccgcatagaggccatgcttgagtgtcagcagttcctcgtgatcgaggaagctaaagtccgccagtacgactcgatccagaagttgctggcggagcggtccctctttcggcaggcgatctcgccttcggaccgcgttaagctgttcccccaccgggcgagcagcaaatgcaagtccaagccgcagatcgccgcgctgaaagaggagaccgaggaggaagtccaagatactcggctctaa

SEQ ID NO: 5 - DNA, 4443 bp, Artificial Sequence
  Description of Artificial Sequence: Synthetic polynucleotide
atgcagaggtcgccccttgagaaggcatcggtcgtgtccaagctgttcttcagctggacacgaccgatccttcgcaaggggtaccgccagcgactggagttgtctgatatctatcagataccttcagtcgactcggcggataacctctccgagaagttagagagagagtgggaccgtgaactcgccagcaagaagaacccaaagctgatcaatgctttgcggcgctgcttcttctggcggttcatgttctacggcatctttctctatctcggagaggttacgaaggcggtgcagccgctcctgctggggcggatcatcgcctcgtatgacccagacgcgaaggaggagcgctccatcgcgatctatctgggcataggcctctgcctcctctttattgttcgtaccttgcttctgcaccccgcgatcttcggtctgcaccacatcgggatgcagatgaggatcgccatgttttctttgatctataagaagacattgaagttgtcgagccgggtcctcgacaaaattagcatagggcagctggtcagtcttctgtcagctgccctagctaagtttgacgagggcctggctctggcacacttcgtgtggatcgctccactccaggtggcgctgttgatgggcctgatatgggagctcttgcaggcgagcgcgttctgtggcctggggtttctcatcgtcctggccttgttccaggcaggccttggacggatgatgatgaagtatcgcgatcagcgcgctggtaagatcagcgagcggctggtcattaccagcgagatgatcgagaacattcagtccgtcaaggcctactgctgggaggaggccatggagaagatgatagaagccctcaggcagacagagctgaagctcacccgcaaggctgcctatgtcaggtacttcaacagctccgccttcttcttctcagggttctttgtcgtgtttctgtccgtcctcccctacgcgttgataaaggggatcatcttgaggaagatcttcacgacgatctccttttgcatcgtgttgaggatggcagtgacacgacaattcccctgggccgtgcagacatggtacgacagtttaggggctattgcgaagatccaggattttctgcagaagcaagagtacaagacgctggaatacgccctcacgaccacggaggtggtcatggagaacgtgaccgccttctgggaggagggctttggtgagctcttcgagaaggccaagcaggccaacgccaatcggaagactagtaacggcgacgactccctgttcttcagcaacttcagcttgctgggcacgccggtcttgaaggacatcaacttcaagatcgagcgtggccagctgctggcagttgctgggagcacgggagcgggcaagactagtcttctgatggtgatcatgggcgagcttgagccttccgaagggaagatcaaacattcaggccggatcagcttctgtagccagttctcgtggatcatgccggggacgataaaggagaatatcatcttcggcgtgagctacgacgaataccgctacagaagcgtgatcaaggcctgccagctcgaggaggatatctccaagttcgccgagaaggataacatcgttctcggcgaaggaggtatcaccttgagcggcggtcagcgcgcccggataagcctggcacgggctgtctataaagatgcagacttgtatcttttagacagcccgttcgggtatctggacgtgctgaccgaaaaggagatcttcgagtcgtgcgtttgtaagctgatggcggccaagacgaggattcttgtcacctctaagatggagcatcttaagaaggctgacaagatcctcattctgcacgaggggagctcctacttctatgggacgttcagcgagttgcagaatcttcagcccgatttctccagtaagcttatgggctgtgactccttcgatcagttctcagctgagcggcgcaactccattctgacggagaccttgcataggttttcgttagaaggagatgcgccggtcagctggactgagacgaagaagcagagctttaagcagactggagaattcggggagaagagaaagaactcgatcctgaaccccatagcaagtatcaggaagttctccatcgtgcagaaaacgcccctgcagatgaacgggatcgaggaggacagtgatgagccgctagaacggaggctgtcgctggtgcctgactcagagcagggcgaggcgatattaccgagaatctcggtgatatcgactggccctactctgcaggcccggcgacggcagtccgttctagcgctcatgacccactcggtcgcgcaggggcaggccatccatcggaagacaaccgcatcgactcgaaaggtctccttagcgccgcaggcggcgctaacggagctcgacatatattcgaggaggctctcccaggagaccggcttggagatctcggaggagatcgccgaggaggatctcaaggagtgcttcttcgatgatatggagagcattccagcggtgacgacttgggctacttacctgcgctacatcacggtgcacaagtcgctgatcttcgtgctgatctggtgcttggtaattttccttgccgaagtggcggcgtccctagtagtcttgtggctactaggggcgacgccacttcaggacaagggaaattccacgcactcacgtaatgcgagctatgcggtgatcatcaccagcactagctcgtattacgtgttctacatctatgtcggggtggcggacacgctgctggccatgggattcttccgtggcctgccgcttgtccacaccctgataacggtgtcgaagatactgcatcacaagatgctccacagcgtgctccaagcaccgatgagcacgctggcgacgttgaaggcgggggggatcctcaacaggttttccaaggatatcgctatcctggatgacctgttgcccctcacgatcttcgacttcatccagctgttgctcatcgtgattggagcaatcgctgtggtagcagtgttgcagccctatatcttcgtggcgactgtgcccgtgatagtagcgtttatcatgctgcgggcctacttcttgcagacttcacagcagttgaagcagctggagtcggaggggcggtcgcccatattcacgcacctggtcacgagcctgaaggggctctggaccttgcgtgcgtttgggcgacagccctacttcgagaccctgtttcataaggctttgaatctgcataccgcagcatggttcctgtacctctccactctccggtggtttcagatgcggattgagatgatcttcgtgattttctttatcgcggtgacattcatttcgattctgaccaccggagagggagagggcagggtgggcataatcctcactctggctatgaacatcatgtcgacgctacagtgggctgtagcgtcgagcatagatgttgatagcctgatgaggagtgtgtccagggtattcaagttcattgacatgcccacggagggtaagcctacgaagagcaccaagccgtacaagaacggccagctctcgaaggtaatgatcatcgagaacagccatgtgaagaaggacgacatatggccctcaggagggcagatgacagtgaaggacctcactgccaagtacaccgaggggggcaacgcgatcctcgaggcgatatcgttctcgatatcgcccgggcagcgcgttggcctcctcggtcgtactggcagtgggaagtccacactgttatctgccttcctgaggcttctcgccactgagggagagatccagattgatggagtctcctgggactccatcactctccagcagtggcggaaggccttcggggtgattccccagaaggtgttcatattttcagggacctttcgtaaggccctggacccgtatgagcagtggtcggatcaggagatctggaaggtagcagacgaggtcggccttcggagcgtgatcgagcagttcccaggtaagctggactttgtgctcgtggatgggggctgcgtcctcagccacgggcacaaacagcttatgtgtcttgctcgatcagtgctctcgaaggccaagatcttgctgctagacgagccttccgcgcatctcgatccggtcacttaccaaatcattcggcgaacgctgaagcaagcgttcgccgattgcaccgtgatcctgtgtgagcacaggatcgaggcgatgctggagtgccagcagttcttggtgatcgaggaggccaaggtgcggcagtacgactcgatccagaagcttctggcggagagaagcctgttccgtcaggctatctctccgtcagatcgggtcaagttgtttccgcaccgggcctcctcgaaatgcaagtcaaagccgcagatagcggctttgaaagaagaaacagaggaggaggtccaggacacccgcctctga

SEQ ID NO: 6 - DNA, 4443 bp, Artificial Sequence
  Description of Artificial Sequence: Synthetic polynucleotide
atgcagaggtcgccccttgagaaggcatcggtcgtgtccaagctgttcttcagctggacacgaccgatccttcgcaaggggtaccgccagcgactggagctatctgatatctatcagataccttcagtcgactcggcggataatctgtccgagaagctagagcgtgaatgggatcgtgagctcgccagcaagaagaacccgaagctcataaacgcgctcagaagatgcttcttctggcgctttatgttctacgggatcttcttgtaccttggcgaggtcacgaaggccgttcagcctctgcttctcggacggattatcgctagttatgaccccgatgctaaggaggagcggtccatcgcgatatacttaggcataggcttatgcctattgtttatcgtgaggaccctcctcctgcatccggcgatcttcggtctgcaccacatcgggatgcagatgaggatcgccatgttttctttgatctataagaagacattgaagttgtcgagccgggtcctcgacaaaattagcatagggcagctggtgagcttattatcagctgccctagctaagtttgacgagggcctggctctggcacacttcgtctggatcgccccattgcaggtggcactgctaatggggctgatctgggagctgctccaggcttccgcgttctgtggtctcggatttctcatcgttctggccctgttccaggcgggactgggccggatgatgatgaagtaccgagaccagagagcggggaagatctcggagcggctggtcataactagcgagatgatcgagaacattcagagcgtgaaggcgtactgctgggaggaggccatggagaagatgattgaagcattaaggcagacggagttgaagctgacacgtaaggccgcttacgtgcggtacttcaactcctctgcctttttcttcagtggcttcttcgtggtcttcctcagcgtactgccttacgctctgatcaaggggatcatccttcgcaagatcttcacgactatcagcttctgcatcgtcctacggatggcggtgacccgccagtttccgtgggcggtgcagacctggtatgatagtcttggagccattgcgaagattcaggatttcctgcagaagcaggaatacaagaccctcgaatacgccctcacgaccacggaggtggtgatggagaacgtcaccgccttctgggaggagggcttcggggagctgttcgagaaggccaagcaggccaacgcgaaccgcaagacctcgaacggggatgattccctgttcttcagcaacttcagcctgctgggcacgccggtcttgaaggacatcaacttcaagatcgagcgtggccagctgctggcagttgctggaagtacgggcgctggcaagacttcccttctgatggtgataatgggcgaattagagccatcagaagggaagatcaagcacagcggccgtattagcttctgcagccagttcagctggattatgccaggcaccatcaaggagaatatcatattcggtgtatcgtacgacgagtatcggtatcggtcggtcatcaaggcatgccagctcgaggaggatatctccaagttcgccgagaaggacaacatcgtgttaggcgaagggggaatcacgctaagtggaggtcagcgtgctcgtatatcgctcgccagagcggtatacaaggacgctgacctctacttgcttgattcccccttcggctatctcgatgtccttacggagaaggagatattcgagagctgtgtatgcaagttgatggccgccaagacgcggatactcgtcacgagtaagatggagcacctcaagaaggcagataagattctgatccttcatgagggctcctcttacttctatgggacgttcagtgagctgcagaatcttcagcccgatttctccagtaagcttatgggctgtgactccttcgatcagttctcagctgagcggcgcaactccattctgacggagaccttgcataggttttcgttagaaggagatgcgccggtcagctggactgagacgaagaagcagagctttaagcagactggagaattcggggagaagagaaagaacagcatactgaaccccatagcttccatccggaagttcagcatcgtccagaagactcctctccagatgaatggaatcgaggaggattcggacgagcccctggagcgtcggctcagtctggtcccggattccgagcagggggaggccatcctccctcggatttcggtgatcagcactgggccgacgctccaggcccggcgccgtcagagcgtcctggcgctgatgacacacagcgtggcgcagggtcaggcgatccatcgcaagaccactgcgtccacgcggaaggtgtcattagcgccacaggccgctctgacggagctggatatctacagccgccgtctctcccaggagacggggctggagatatcggaggagatcgccgaggaggacctcaaggagtgcttcttcgacgacatggagagcattcctgcggtcactacctgggcgacctacctccgatacatcacggtacacaagagtttgatattcgtcttgatatggtgcctggtcatattcctagctgaagtggctgcatcgctcgtggtgttgtggctgttgggtgctactcccctgcaggacaaggggaatagcacccacagccgcaacgcctcgtacgcggtgatcatcaccagtacgagctcctactatgtgttctacatatatgtaggagttgctgacacgttgttagcgatgggcttcttcagggggttacccctggtccatacgctgataacggtcagcaagatcctgcaccacaagatgctccattcagtgttgcaagcgccgatgtcgacgcttgcaacactgaaggctggaggcatcttgaacaggttctcgaaggacattgcaatactggacgacctattgcccctgacgatcttcgacttcatccagttgttgttgatcgtcataggggcaatagcggtcgtcgcagtattgcagccgtacatctttgtcgccactgtgccagttatcgtcgccttcataatgttgagagcctacttccttcagactagtcagcagctgaagcagttggagagcgagggtcgctctccaatcttcacgcacttggtgactagtctgaaggggctctggacattgcgggcattcgggcggcagccgtattttgagaccttgttccacaaggctctcaatttacacactgccgcctggttcctgtacctctccactctccggtggttccagatgaggatcgagatgatcttcgtgatattctttatcgcggtgaccttcatctcgatcctcaccaccggagagggagaggggcgagtggggatcattctcacactcgccatgaacatcatgagcacgctccagtgggctgtcgcgtcgagcatcgacgtcgacagcctcatgcggagcgtgtctcgtgtgttcaagttcatcgatatgcctacggagggcaagcccaccaagagtacgaagccgtacaagaatgggcagctctccaaggtaatgattatcgagaactcccatgtgaagaaggacgatatctggcccagtggcggccagatgacggttaaagaccttactgcgaagtacaccgaaggcggcaacgccattctggaggcgatatcgttttccatctcacccggtcagcgggtcggcctcctcggtcgcacggggtcggggaagagcactctgctgagtgcttttctccgactccttgcgaccgagggggagatccagattgacggggtgagttgggattcgataaccctccagcagtggcgtaaggccttcggtgtaattccgcagaaggtctttatcttctcggggaccttccggaaggctcttgatccgtacgagcaatggtcggatcaagagatctggaaggtcgccgacgaagtcgggcttcgctcggtgatcgagcagttcccgggcaagctcgacttcgtcttggtcgatggagggtgcgttctgagccacggccataagcagcttatgtgcctggctcggagcgtactctccaaggccaagattctgctcttggatgagccgagtgctcacctggatccggtgacctaccagatcattcggcgaacgctgaagcaagcgttcgccgattgcaccgtgatcctgtgtgagcacaggatcgaggccatgctggagtgccagcagttcctcgtgatcgaggaagcgaaggtacgccagtatgactcgatccagaagctgctggcggagagatccctgttccgtcaggcgatctctccgtcagaccgggtgaagctatttcctcatcgggcctcctcgaagtgcaagtcaaagccgcagattgcggctttgaaggaggagaccgaggaggaagtgcaggacacccggttataa

SEQ ID NO: 7 - DNA, 4443 bp, Artificial Sequence
  Description of Artificial Sequence: Synthetic polynucleotide
atgcagaggtcgccccttgagaaggcatcggtcgtgtccaagctgttcttcagctggacacgaccgatccttcgcaaggggtaccgccagcgactggagctatctgatatctatcagataccttcagtcgactcggcggataatctgtccgagaagctagagcgtgaatgggatcgtgagctcgccagcaagaagaacccgaagctcataaacgcgctcagaagatgcttcttctggcgctttatgttctacgggatcttcttgtaccttggcgaggtcacgaaggccgttcagcctctgcttctcggacggattatcgctagttatgaccccgatgctaaggaggagcggtccatcgcgatatacttaggcataggcttatgcctattgtttatcgtgaggaccctcctcctgcatccggcgatcttcggtctgcaccacatcgggatgcagatgaggatcgccatgttttctttgatctataagaagacattgaagttgtcgagccgggtcctcgacaaaattagcatagggcagctggtgagcttattatcagctgccctagctaagtttgacgagggcctggctctggcacacttcgtctggatcgccccattgcaggtggcactgctaatggggctgatctgggagctgctccaggcttccgcgttctgtggtctcggatttctcatcgttctggccctgttccaggcgggactgggccggatgatgatgaagtaccgagaccagagagcggggaagatctcggagcggctggtcataactagcgagatgatcgagaacattcagagcgtgaaggcgtactgctgggaggaggccatggagaagatgattgaagcattaaggcagacggagttgaagctgacacgtaaggccgcttacgtgcggtacttcaactcctctgcctttttcttcagtggcttcttcgtggtcttcctcagcgtactgccttacgctctgatcaaggggatcatccttcgcaagatcttcacgactatcagcttctgcatcgtcctacggatggcggtgacccgccagtttccgtgggcggtgcagacctggtatgatagtcttggagccattgcgaagattcaggatttcctgcagaagcaggaatacaagaccctcgaatacgccctcacgaccacggaggtggtgatggagaacgtcaccgccttctgggaggagggcttcggggagctgttcgagaaggccaagcaggccaacgcgaaccgcaagacctcgaacggggatgattccctgttcttcagcaacttcagcctgctgggcacgccggtcttgaaggacatcaacttcaagatcgagcgtggccagctgctggcagttgctggaagtacgggcgctggcaagacttcccttctgatggtgataatgggcgaattagagccatcagaagggaagatcaagcacagcggccgtattagcttctgcagccagttcagctggattatgccaggcaccatcaaggagaatatcatattcggtgtatcgtacgacgagtatcggtatcggtcggtcatcaaggcatgccagctcgaggaggatatctccaagttcgccgagaaggacaacatcgtgttaggcgaagggggaatcacgctaagtggaggtcagcgtgctcgtatatcgctcgccagagcggtatacaaggacgctgacctctacttgcttgattcccccttcggctatctcgatgtccttacggagaaggagatattcgagagctgtgtatgcaagttgatggccgccaagacgcggatactcgtcacgagtaagatggagcacctcaagaaggcagataagattctgatccttcatgagggctcctcttacttctatgggacgttcagtgagctgcagaatcttcagcccgatttctccagtaagcttatgggctgtgactccttcgatcagttctcagctgagcggcgcaactccattctgacggagaccttgcataggttttcgttagaaggagatgcgccggtcagctggactgagacgaagaagcagagctttaagcagactggagaattcggggagaagagaaagaacagcatactgaaccccatagcttccatccggaagttcagcatcgtccagaagactcctctccagatgaatggaatcgaggaggattcggacgagcccctggagcgtcggctcagtctggtcccggattccgagcagggggaggccatcctccctcggatttcggtgatcagcactgggccgacgctccaggcccggcgccgtcagagcgtcctggcgctgatgacacacagcgtggcgcagggtcaggcgatccatcgcaagaccactgcgtccacgcggaaggtgtcattagcgccacaggccgctctgacggagctggatatctacagccgccgtctctcccaggagacggggctggagatatcggaggagatcgccgaggaggacctcaaggagtgcttcttcgacgacatggagagcattcctgcggtcactacctgggcgacctacctccgatacatcacggtacacaagagtttgatattcgtcttgatatggtgcctggtcatattcctagctgaagtggctgcatcgctcgtggtgttgtggctgttgggtgctactcccctgcaggacaaggggaatagcacccacagccgcaacgcctcgtacgcggtgatcatcaccagtacgagctcctactatgtgttctacatatatgtaggagttgctgacacgttgttagcgatgggcttcttcagggggttacccctggtccatacgctgataacggtcagcaagatcctgcaccacaagatgctccattcagtgttgcaagcgccgatgtcgacgcttgcaacactgaaggctggaggcatcttgaacaggttctcgaaggacattgcaatactggacgacctattgcccctgacgatcttcgacttcatccagttgttgttgatcgtcataggggcaatagcggtcgtcgcagtattgcagccgtacatctttgtcgccactgtgccagttatcgtcgccttcataatgttgagagcctacttccttcagactagtcagcagctgaagcagttggagagcgagggtcgctctccaatcttcacgcacttggtgactagtctgaaggggctctggacattgcgggcattcgggcggcagccgtattttgagaccttgttccacaaggctctcaatttacacactgccgcctggttcctgtacctctccactctccggtggttccagatgaggatcgagatgatcttcgtgatattctttatcgcggtgaccttcatctcgatcctcaccaccggagagggagaggggcgagtggggatcattctcacactcgccatgaacatcatgagcacgctccagtgggctgtcgcgtcgagcatcgacgtcgacagcctcatgcggagcgtgtctcgtgtgttcaagttcatcgatatgcctacggagggcaagcccaccaagagtacgaagccgtacaagaatgggcagctctccaaggtaatgattatcgagaactcccatgtgaagaaggacgatatctggcccagtggcggccagatgacggttaaagaccttactgcgaagtacaccgaaggcggcaacgccattctggaggcgatatcgttttccatctcacccggtcagcgggtcggcctcctcggtcgcacggggtcggggaagagcactctgctgagtgcttttctccgactccttgcgaccgagggggagatccagattgacggggtgagttgggattcgataaccctccagcagtggcgtaaggccttcggtgtaattccgcagaaggtctttatcttttccgggaccttccggaaggctcttgatccgtacgagcaatggtcggatcaagagatctggaaggtcgcggacgaagtcgggcttcgctcggtgatcgagcagttcccgggcaagctcgacttcgtcttggtcgatggagggtgcgttctctcgcacgggcacaagcagctgatgtgcctggcgaggagcgtactctccaaggccaagatcctcctcctcgatgagccgtcggcgcatctggacccggtgacttaccagattattcgccggacgctgaaacaagctttcgcggactgtacggtgatattgtgtgagcaccggatagaggctatgctcgagtgccagcagtttctggttatcgaagaggcgaaggttcgccagtacgatagcatccagaagctgctggccgagcgtagcctcttccggcaggcaatatcaccgtcagaccgcgtaaagctgtttccgcatcgggcgagtagtaagtgtaagtcaaagccgcagatcgccgcgctcaaggaggagacggaggaggaggtgcaggacacgcgcctctaa

SEQ ID NO: 8 - DNA, 4443 bp, Artificial Sequence
  Description of Artificial Sequence: Synthetic polynucleotide
atgcagaggtccccccttgagaaggcatcggtcgtgtccaagctgttcttcagctggacacgaccgatccttcgcaaggggtaccgccagcgactggagctatctgatatctatcagataccttcagtcgactcggcggataatctgtccgagaagctagagcgtgaatgggatcgtgagctcgccagcaagaagaacccgaagctcataaacgcgctcagaagatgcttcttctggcgctttatgttctacgggatcttcttgtaccttggcgaggtcacgaaggccgttcagcctctgcttctcggacggattatcgctagttatgaccccgatgctaaggaggagcggtccatcgcgatatacttaggcataggcttatgcctattgtttatcgtgaggaccctcctcctgcatccggcgatcttcggtctgcaccacatcgggatgcagatgaggatcgccatgttttctttgatctataagaagacattgaagttgtcgagccgggtcctcgacaaaattagcatagggcagctggtgagcttattatcagctgccctagctaagtttgacgagggcctggctctggcacacttcgtctggatcgccccattgcaggtggcactgctaatggggctgatctgggagctgctccaggcttccgcgttctgtggtctcggatttctcatcgttctggccctgttccaggcgggactgggccggatgatgatgaagtaccgagaccagagagcggggaagatctcggagcggctggtcataactagcgagatgatcgagaacattcagagcgtgaaggcgtactgctgggaggaggccatggagaagatgattgaagcattaaggcagacggagttgaagctgacacgtaaggccgcttacgtgcggtacttcaactcctctgcctttttcttcagtggcttcttcgtggtcttcctcagcgtactgccttacgctctgatcaaggggatcatccttcgcaagatcttcacgactatcagcttctgcatcgtcctacggatggcggtgacccgccagtttccgtgggcggtgcagacctggtatgatagtcttggagccattgcgaagatccaggacttcttgcagaagcaggagtataagactctggagtacgccctcacgaccacggaggtggtgatggagaacgtcaccgccttctgggaggagggcttcggggagttgttcgagaaggccaagcaggccaacgccaatcgaaagacttcgaatggcgatgacagcttgttcttctcgaacttctccctgctgggcacgccggtcttgaaggacatcaacttcaagatcgagcgtggccagctcctggcggtggccgggagcacgggggctgggaagaccagcctcctcatggtgatcatgggggagctcgagccaagtgaagggaagatcaaacactcgggccggattagtttttgctcgcagttttcatggatcatgcccggtaccatcaaggagaacatcatctttggtgtctcctatgatgagtaccggtatcgatccgtgataaaggcctgccagctcgaggaggatatctccaagttcgccgagaaggataacatcgttctcggcgaaggaggtatcaccttgagcggcgggcagcgagcaagaattagtctggcccgagctgtttacaaggatgctgacctttacttgctcgactccccctttggttaccttgacgtactcacagagaaggagatctttgagtcctgcgtctgcaagttgatggcggcgaagaccaggatcttggtcacctctaagatggagcatcttaagaaggcggacaagatcctcattctgcacgaggggagctcctacttctatgggacgttcagcgagttgcagaatcttcagcccgatttctccagtaagcttatgggctgcgattcgtttgatcagttctcagctgagcggcgcaactccattctgacggagaccttgcataggttttcgttagaaggagatgcgccggtcagctggactgagacgaagaagcagtcctttaagcagactggagaattcggggagaagagaaagaactcgatcctgaaccccatagcaagtatcaggaagttctccatcgtgcagaagacgccgctccagatgaacggaatcgaggaggattccgacgagcctctggagcggcgtctttcccttgttccggactcggaacaaggggaggccatactgccgcgcatcagcgttatcagcacggggccgacgctgcaggcgcggcgtcggcagtccgtgctggcgctgatgacgcacagtgtggcccagggccaggctatccaccgcaagacgaccgcgtctacgcggaaggttagcctggccccccaggcggcactgacggagctcgacatatattcgaggaggctctcccaggagaccggcttggagatctcggaggagatcgccgaggaggatctcaaggagtgcttcttcgatgatatggagagcattccggcagtgaccacctgggccacttaccttcgctacatcaccgtgcataagagcttgatattcgtgctgatctggtgtctggttatctttctcgctgaagtggcggcgtccctagtagtcttgtggctgctaggggcgacgccacttcaggacaaaggtaactcgacccacagcaggaatgcaagctatgcggtgatcattacgagcaccagctcgtactacgtgttctacatctacgtcggggtggcggacacgctgctggccatgggattcttccgtggcctgccgcttgtccacaccctgataactgttagcaagatcttgcaccacaagatgttgcacagtgtccttcaagcgccgatgagtactctcgccacgcttaaagcgggcgggatactcaatcggttctcgaaggacatcgccatcctagacgatctgctgccgctgacgatattcgactttatccagctgctgctgatcgtcataggggcgattgcggttgtagctgtgctacagccgtatatattcgtggccacggtcccagtgatagtggcgttcattatgttgagggcgtacttccttcagacttcccagcagctgaagcagctggagtctgaaggaaggtcgcccattttcacccacctggtgacaagtctcaagggcctgtggacgttgagggcctttgggaggcagccgtacttcgagacgctgttccataaggccctcaacctccacacggccgcttggttcttgtatctctccactctccggtggttccagatgaggatcgagatgatcttcgtgatattctttatcgcggtgaccttcatctcgatcctcaccaccggagagggagagggccgggtcgggatcatcctgaccctggccatgaacataatgagcaccctgcagtgggccgtggcctcgagtatagatgtagactcactgatgaggagcgtgtcgcgagttttcaagtttatcgacatgcctacggagggcaagcccaccaagagtacgaagccgtacaagaatgggcagctctccaaggtaatgataattgagaactcgcacgtcaagaaagacgatatctggccctccggtgggcagatgacggtcaaggacctcactgccaagtacacggagggcgggaacgccattctggaagcgatatcgttttccatctcacccggtcagagggtcggcctcctcggtcgcacggggtcggggaagagcactctgctgagtgcttttctccgactccttgcgaccgagggggagatccagatcgacggggtgagttgggattcgataacgctccagcagtggcgtaaggccttcggggttataccccagaaggtcttcatcttttccgggaccttccggaaggctcttgatccctacgagcagtggagcgatcaagagatctggaaggtcgcggatgaggtggggttgaggagcgtgatcgagcagtttccaggaaagctggacttcgtccttgttgacggaggctgcgtgctgagccatgggcacaagcagctcatgtgcttagcacgcagcgtcctcagcaaggcgaagatcctgctcctggatgagccgagcgcgcacctcgacccggtgacgtaccagatcatccggcggacgttgaaacaggcctttgcggactgtacagtgatcctctgcgagcatcggatcgaggccatgctggagtgccagcagttcctcgtgatagaggaagcgaaggtacgccagtatgactcgatccagaagttgctcgcagagcgatcactgttccgccaggccatttcaccgtccgaccgggtgaagctgttcccgcaccgcgcctcctccaagtgtaagtcaaagccgcagattgcggctttgaaggaggagactgaggaggaggtgcaggacacgcgcctctaa

SEQ ID NO: 9 - DNA, 4443 bp, Artificial Sequence
  Description of Artificial Sequence: Synthetic polynucleotide
atgcagaggtccccccttgagaaggcatcggtcgtgtccaagctgttcttcagctggacacgacccatcctccggaagggttatcggcagcgactggagctatctgatatctatcagataccttcagtcgactctgccgataacctcagcgagaagctggagcgagaatgggatcgtgagctggcgagtaagaaggccccgaagctaatagctgcactgcgtcgttgcttcttctggaggtttatgttttatggcatattcctctacttaggagaagtaacgaaggcagtgcagccgttgcttctgggccggattatcgccagctacgatcccgatgcgaaggaggagaggtcgatcgccatctacttggggatcggcctctgcctccttttcatcgtgcggacattgttgctgcacccggcgatcttcggtctgcaccacatcgggatgcagatgaggatcgccatgttctcgctgatctacaagaagacgctgaagctgagctctcgcgtcttggacaagatcagcattgggcagctggtaagcttgctcagtgctgctcttgccaagttcgacgagggcttagctttagcgcacttcgtgtggatcgccccgctgcaggtggcgctcctgatggggctcatctgggagctccttcaggctagcgccttctgcggcttggggttcttgatcgtcctcgcattatttcaggcgggtctcggccgcatgatgatgaagtaccgggaccagcgtgccggtaagatcagcgagcggctggtgatcacgtctgagatgatcgaggcgatccagagcgttaaggcgtactgctgggaagaagccatggagaagatgatcgaggcgctgcggcaaaccgaacttaagctgaccagaaaggcagcttatgttcggtactttgccagcagcgccttcttcttctccggcttcttcgtagtattccttagcgttctgccgtacgcgctgataaagggaatcatcctcaggaagatcttcacgactatcagcttctgcatcgtcttacgaatggccgtcacgcgccagttcccatgggcggtgcagacctggtatgacagcctcggggcgatagcgaagatccaggacttcctgcagaagcaggagtacaagaccctggagtacgcgctaacgaccaccgaggttgtcatggaggctgtaacggccttttgggaagaggggtttggcgagctattcgagaaggcgaagcaggcagctgctaatcggaagacttccaatggggatgattcccttttcttcagcgcgttcagtctcttggggacgccggtcctcaaggacatcgcgttcaagattgagcgcggccagcttctcgctgttgccggctccaccggagccggcaaaaccagcttgctcatggtgataatgggcgagctggaaccgtccgagggcaagatcaagcacagcgggcggatcagcttctgctcgcagttcagctggatcatgcccgggacgatcaaggaggcaataatcttcggggttagctacgacgagtatagatatcgctccgtcatcaaggcctgccagctcgaggaggatatctccaagttcgccgagaaggatgccatcgttctcggcgaaggaggtatcaccttgagcggtggccagagagcgcgtatttcgctggccagagctgtatacaaggacgcggatctctaccttctcgacagcccgttcggttatctggacgtgctgaccgagaaggagatattcgagtcctgtgtgtgcaagctcatggccgcgaagacgcgcattctggtcaccagcaagatggagcatctgaagaaggccgataagatactgattctccacgaggggagttcgtatttttacggcactttttcagagctccagaacttgcagccggacttctccagtaagcttatgggctgcgattcgtttgatcagttctccgcggagcggcgggcgtccatcctgactgagacgttgcatcgtttcagtctggagggggacgcccccgtttcgtggactgagacgaagaagcagtcctttaagcagactggagagttcggcgagaagcgaaaggcgtcaatcttggcgcctatcgcttctattcggaagttcagcatcgtgcagaagacgccgctccagatggctggtatcgaggaggactcggacgagcctctggagcggcgtctttcgctggtgccggactccgaacagggcgaggctatccttccgcgcatcagcgttatcagcacggggccgacgctgcaggcgcggcgtcggcagtccgtgctggcgctgatgacgcatagcgtggcgcagggtcaggcgatccatcgcaagaccactgcgtccacgcggaaggttagcctcgccccccaggccgccttgacggagcttgatatctatagtcgtcgtttgtcccaggagaccggtttagagatctcggaggagatcgcggaggaggacttgaaggagtgcttcttcgacgatatggagagcataccagcagtgacgacgtgggcgacttatctacggtacataaccgtacataagtcgctcattttcgtcctgatctggtgtctcgtcatatttctggcggaggtggcggcatcgctagtggtgttgtggctgctgggtgctacccccttgcaggacaagggggctagcacccacagccgcaacgccagctatgcggtgatcatcacctccaccagctcctactatgtgttctacatatatgtaggagttgctgacacgttattagcgatgggcttcttcagggggttacccctggtccatacgctgataacggtcagcaaaatcctccaccataagatgttgcacagcgtgctccaggcccccatgagcacgctggcaactcttaaggctggaggaattctgaaccggttctccaaggacatcgctatcctcgatgatttattgccactcacaatattcgacttcatccagttgttgttgatcgtcataggggcgattgcggttgtagctgtgctacagccgtatatattcgtggccacggtcccagtgatagtggcgttcattatgttgagggcgtacttccttcagacttcccagcagctgaagcagctggagtctgaaggaaggtcgcccattttcacccacctggtgacaagtctcaagggcctgtggacgttgagggcctttgggaggcagccgtacttcgagacgctgttccataaggccctcaacctccacacggccgcttggttcttgtatctctccactctccggtggttccagatgaggatcgagatgatcttcgtgatattctttatcgcggtgaccttcatctcgatcctcaccaccggagagggagagggccgggtcgggatcatcctgaccctggccatgaacataatgagcaccctgcagtgggccgtggcctcgagtatagatgtagactcactgatgaggagcgtgtcgcgagttttcaagtttatcgacatgcctacggagggcaagcccaccaagagtacgaagccgtacaagaatgggcagctctccaaggtaatgataattgagaactcgcacgtcaagaaagacgatatctggccctccggtgggcagatgacggtcaaggacctcactgccaagtacacggagggcgggaacgccattctggaagcgatatcgttttccatctcacccggtcagagggtcggcctcctcggtcgcacggggtcggggaagagcactctgctgagtgcttttctccgactccttgcgaccgagggggagatccagatcgacggggtgagttgggattcgataacgctccagcagtggcgtaaggccttcggggttataccccagaaggtcttcatcttttccgggaccttccggaaggctcttgatccctacgagcagtggagcgatcaagagatctggaaggtcgcggatgaggtggggttgaggagcgtgatcgagcagtttccaggaaagctggacttcgtccttgttgacggaggctgcgtgctgagccatgggcacaagcagctcatgtgcttagcacgcagcgtcctcagcaaggcgaagatcctgctcctggatgagccgagcgcgcacctcgacccggtgacgtaccagatcatccggcggacgttgaaacaggcctttgcggactgtacagtgatcctctgcgagcatcggatcgaggccatgctggagtgccagcagttcctcgtgatagaggaagcgaaggtacgccagtatgactcgatccagaagttgctcgcagagcgatcactgttccgccaggccatttcaccgtccgaccgggtgaagctgttcccgcaccgcgcctcctccaagtgtaagtcaaagccgcagattgcggctttgaaggaggagactgaggaggaggtgcaggacacgcgcctctaa

SEQ ID NO: 10 - DNA, 4443 bp, Artificial Sequence
  Description of Artificial Sequence: Synthetic polynucleotide
atgcagaggtccccccttgagaaggcatcggtcgtgtccaagctgttcttcagctggacacgcccgatactccgcaagggctaccgccagcggctggagctctcggacatttaccagatcccctccgtcgattccgctgacgctctcagcgagaagctggagcgtgagtgggatcgagagctggcgagcaagaaagcgccaaaattaatagcggcgctgcgccgctgttttttttggcgctttatgttctacggcatcttcctgtatcttggcgaggtaacgaaggcggtgcagccgctcctccttggccggatcatagcctcatatgatccggacgccaaggaggagcggagcatcgccatctacctcggcatcggtctgtgtctgctgtttatagtgcggaccttattgctgcacccagcaatattcggtctgcaccatataggcatgcagatgcggatcgcgatgttctcgctgatctacaagaagacgctgaagctgagctctcgcgtcttggacaagatcagcattgggcagctggtaagcttgctcagtgctgctcttgccaagttcgacgagggcttagctttagcgcacttcgtgtggatcgcgccgctccaggtggccctgttaatgggactgatctgggagctgctccaggcttccgcgttctgtggtctcggcttcctcatcgtcctagccctgtttcaagcagggctaggacgaatgatgatgaagtatcgagaccagagagcggggaagatctctgagcggctcgtgatcacgtccgagatgatagaggccatccagagcgtgaaagcctactgttgggaggaggctatggagaagatgatcgaggcgttgcggcagaccgagttaaagttgactcggaaggccgcatacgtccgatacttcgcctccagtgccttcttcttcagtgggttttttgtcgtgtttctgtctgtgctgccctatgcattgataaaggggatcatcctgaggaagatcttcacgacgatctccttttgcatagtgctgcgcatggcagtgacacgacagttcccctgggctgtccagacatggtacgacagcctaggggcaatcgccaagatacaggacttcctgcagaagcaggaatacaagacgctggagtacgccttgacgaccacggaggtggtcatggaggcggtcacagcgttttgggaggagggatttggtgaattgttcgagaaggccaagcaggctgcagcgaaccggaagacgagcaacggggacgactcgttgttcttttccgcgttcagcctgcttggcacgccggtcttgaaggacatcgccttcaagatcgagcgtggccagctgctggcggtagccgggagtacgggcgcagggaagaccagcttgctcatggtgatcatgggcgagctggagccttccgagggcaagatcaagcacagcgggcggatcagcttctgctcgcagttcagctggatcatgcccggtaccatcaaggaggctatcatctttggtgtctcctatgatgagtaccgatatcggagcgtgatcaaggcctgccagctcgaggaggatatctccaagttcgccgagaaggacgccatagtcctcggcgaaggaggtatcaccttgagcggcgggcagcgcgctcggatatcgctggccagagctgtatacaaggacgcggatctctaccttctcgacagcccgttcggttatctggacgtgctgaccgagaaggagatattcgagtcctgtgtatgcaagctcatggccgcgaagacgcggatattggtgaccagtaagatggagcacctcaagaaggcggacaagatccttatcctgcacgaggggtcgtcctacttctacgggaccttcagcgagttgcaggcacttcagccagacttttcgtccaagctgatggggtgcgactccttcgaccagttctcggcggagcgtcgtgcgtcaatcttgacggagacgctccaccggttctcgttggagggggacgcacccgtcagctggacggagacgaaaaaacagtcttttaagcagactggagaatttggggagaagcgaaaggcgtcaatcttggcgcctatcgcttctatccgcaaattctccattgtgcagaagacgccgctccagatggctggtatcgaggaggactcggacgagcctctggagcggcggctttcccttgttccggactcggagcaaggggaagccatcttgccgcggatttcggtgatatcgaccgggcccacgctgcaagcgaggcgtcgtcagagcgtgctggctctgatgacgcactcggttgcgcagggccaggcgatacaccgaaagacgacggcaagtacccgtaaggtcagcctggccccccaggctgcccttacggaactagacatctactcaagacgactgagtcaggagactggactggagatatcggaggagatcgccgaggaggacctgaaggaatgcttcttcgacgacatggagagcattcctgcagtgaccacctgggcgacctacctccgatatatcacagtccacaagtccctgattttcgtcttgatctggtgtctagttatcttcctggctgaagtggctgcctcgctggtggtcctgtggttgttaggggcgacccctctgcaggataagggtgcgtccacccactcgagggctgcatcttacgcggtcatcatcacgtccacgtcttcgtattatgtgttctacatatatgtcggggtggcggacacgctgctggccatgggattcttccgtggcctgccgcttgtccacaccctgataaccgtgtccaagatcctgcaccacaagatgttgcacagcgtgctccaggcccccatgagcacgctggcaacattgaaggcgggcgggatcttggcacggttcagcaaggacatcgcgatcctagacgatctgctgccgctgacgatattcgactttatccagctgctgctgatcgtcataggagccatcgcggtcgttgctgtgctgcagccatatatctttgtggctacagtgccggtgatagtcgcattcatcatgctgcgagcatatttcctccagacttcccagcaactgaagcagttagagagcgaaggccgatctcccatcttcactcacctggtcacgtcgctcaaaggcctgtggaccctacgggcctttgggcgacagccttatttcgagaccctcttccataaggcgctggcccttcatacggctgcgtggtttttgtacctctccactctccggtggttccagatgaggatcgagatgatcttcgtgatattctttatcgcggtgaccttcatctcgatcctcaccaccggagagggagaggggcgagtcggcatcatattgacgctggccatggccattatgagtactctccaatgggccgtggccagctcaatagatgtcgactcgctcatgcgttccgtcagtcgcgtgtttaagttcatagacatgccgactgagggaaagcccacaaaatccacgaagccgtataagaacggccagctgtccaaggtgatgattattgaagctagtcacgtcaagaaggacgacatctggccctccggtgggcagatgacggtgaaggacctcactgccaagtacacggagggcggggccgccattcttgaggcgattagcttcagtatatcacctggacagagggtgggcttgctgggccggaccgggtccggcaagtccaccctcctctccgccttccttcgcttgcttgcgacggaaggggagatccagatcgatggggtgtcctgggattccataacgttgcagcagtggaggaaggccttcggggttataccccagaaggtcttcatcttctctgggacgtttcggaaggccctggacccctacgagcagtggagtgaccaggagatctggaaggtggccgacgaggtcggccttcgctctgtgattgagcagtttcctgggaagctggattttgtgctcgtagatggtggatgcgtactatcacacggccacaagcagttgatgtgcctcgctcgctccgtcttgtccaaggccaagatcctgctgctggacgagcccagcgctcacctcgatccggtgacgtaccagatcatccggcgaacgctgaagcaagcgttcgccgactgcacggtgatcttgtgcgagcaccggatcgaggcgatgctggagtgccagcagttcttggtcatcgaggaggccaaggtgcggcagtacgactcgatccagaagcttctggcggagagaagcctgttccggcaggctatctctccgtcagatcgggtcaagttgtttccgcaccgggcctcctcgaaatgcaagtcaaagccgcagattgcggctttgaaggaggagacggaggaggaggtacaggatactcgcttgtga

SEQ ID NO: 11 - DNA, 4443 bp, Artificial Sequence
  Description of Artificial Sequence: Synthetic polynucleotide
atgcagaggtccccccttgagaaggcatcggtcgtgtccaagctgttcttcagctggacacgcccaattcttcggaaaggttatcggcagcgactggagttatctgatatctatcagataccttcagtcgactctgccgataacctttccgaaaagttggagcgcgaatgggaccgcgagctcgcgtccaagaagaacccgaagctcataaacgcgctcagaagatgcttcttctggcgctttatgttctacgggatcttcctgtatcttggcgaggtcaccaaggctgtccagccgctcctccttggccggatcatagcctcatatgatccggacgccaaggaggagcggagcattgctatatacctgggcataggcctgtgcctcctcttcatagttcggactctgctgctgcacccggccatcttcggcctccaccacatcggtatgcagatgcggattgcgatgttctctctgatttataagaagacgctcaagctcagctcgcgggtcctggacaagatctcaatcggccaactggtcagcctgttgagcgcagcactagccaagttcgacgaagggctggcgcttgcgcatttcgtatggatagccccattgcaggtggcactgctaatggggctaatatgggaattgctgcaagcgtcagccttttgcggacttggcttcctgatagtgctggcgctcttccaggctggccttggccgaatgatgatgaagtaccgggaccagcgagctgggaagatctcggagcgtcttgttataacatcagagatgatcgagaacatccaatccgtaaaggcatactgttgggaggaggccatggagaagatgatcgaggcgctgcggcagaccgaactaaagttgacgaggaaggcagcctatgtccggtatttcaatagcagtgctttcttcttctcggggttctttgtggtgttcttgtcagtgctgccctatgcactgatcaagggcatcatactccggaagatttttaccacgatcagcttctgcatcgtcctacggatggcggtgacccgccagtttccgtgggcggtgcagacgtggtacgacagccttggtgccatcgccaagatacaggacttcctgcagaagcaggaatacaagacgctggagtacgccttgacgaccacggaggtggtcatggaggcggtcacagcgttttgggaggagggatttggtgaattgttcgagaaggccaagcaggctgcagcgaaccggaagacgagcaacggggacgactcgttgttcttttccgcgttcagcctgcttggcacgccggtcttgaaggacatcgccttcaagatcgagcgtggccagctgctggcggtagccgggagtacgggcgcagggaagaccagcttgctcatggtgatcatgggcgagctggagccttccgagggcaagatcaagcacagcgggcggatcagcttctgctcgcagttcagctggatcatgcccggtaccatcaaggaggctatcatctttggtgtctcctatgatgagtaccgatatcggagcgtgatcaaggcctgccagctcgaggaggatatctccaagttcgccgagaaggacgccatagtcctcggcgaaggaggtatcaccttgagcggcgggcagcgcgctcggatatcgctggccagagctgtatacaaggacgcggatctctaccttctcgacagcccgttcggttatctggacgtgctgaccgagaaggagatattcgagtcctgtgtatgcaagctcatggccgcgaagacgcggatattggtgaccagtaagatggagcacctcaagaaggcggacaagatccttatcctgcacgaggggtcgtcctacttctacgggaccttcagcgagttgcaggcacttcagccagacttttcgtccaagctgatggggtgcgactccttcgaccagttctcggcggagcgtcgtgcgtcaatcttgacggagacgctccaccggttctcgttggagggggacgcacccgtcagctggacggagacgaaaaaacagtcttttaagcagactggagaatttggggagaagcgaaaggcgtcaatcttggcgcctatcgcttctatccgcaaattctccattgtgcagaagacgccgctccagatggctggtatcgaggaggactcggacgagcctctggagcggcggctttcccttgttccggactcggagcaaggggaagccatcttgccgcggatttcggtgatatcgaccgggcccacgctgcaagcgaggcgtcgtcagagcgtgctggctctgatgacgcactcggttgcgcagggccaggcgatacaccgaaagacgacggcaagtacccgtaaggtcagcctggccccccaggctgcccttacggaactagacatctactcaagacgactgagtcaggagactggactggagatatcggaggagatcgccgaggaggacctgaaggaatgcttcttcgacgacatggagagcattcctgcagtgaccacctgggcgacctacctccgatatatcacagtccacaagtccctgattttcgtcttgatctggtgtctagttatcttcctggctgaagtggctgcctcgctggtggtcctgtggttgttaggggcgacccctctgcaggataagggtgcgtccacccactcgagggctgcatcttacgcggtcatcatcacgtccacgtcttcgtattatgtgttctacatatatgtcggggtggcggacacgctgctggccatgggattcttccgtggcctgccgcttgtccacaccctgataaccgtgtccaagatcctgcaccacaagatgttgcacagcgtgctccaggcccccatgagcacgctggcaacattgaaggcgggcgggatcttggcacggttcagcaaggacatcgcgatcctagacgatctgctgccgctgacgatattcgactttatccagctgctgctgatcgtcataggagccatcgcggtcgttgctgtgctgcagccatatatctttgtggctacagtgccggtgatagtcgcattcatcatgctgcgagcatatttcctccagacttcccagcaactgaagcagttagagagcgaaggccgatctcccatcttcactcacctggtcacgtcgctcaaaggcctgtggaccctacgggcctttgggcgacagccttatttcgagaccctcttccataaggcgctggcccttcatacggctgcgtggtttttgtacctctccactctccggtggttccagatgaggatcgagatgatcttcgtgatattctttatcgcggtgaccttcatctcgatcctcaccaccggagagggagaggggcgagtcggcatcatattgacgctggccatggccattatgagtactctccaatgggccgtggccagctcaatagatgtcgactcgctcatgcgttccgtcagtcgcgtgtttaagttcatagacatgccgactgagggaaagcccacaaaatccacgaagccgtataagaacggccagctgtccaaggtgatgattattgaagctagtcacgtcaagaaggacgacatctggccctccggtgggcagatgacggtgaaggacctcactgccaagtacacggagggcggggccgccattcttgaggcgattagcttcagtatatcacctggacagagggtgggcttgctgggccggaccgggtccggcaagtccaccctcctctccgccttccttcgcttgcttgcgacggaaggggagatccagatcgatggggtgtcctgggattccataacgttgcagcagtggaggaaggccttcggggttataccccagaaggtcttcatcttctctgggacgtttcggaaggccctggacccctacgagcagtggagtgaccaggagatctggaaggtggccgacgaggtcggccttcgctctgtgattgagcagtttcctgggaagctggattttgtgctcgtagatggtggatgcgtactatcacacggccacaagcagttgatgtgcctcgctcgctccgtcttgtccaaggccaagatcctgctgctggacgagcccagcgctcacctcgatccggtgacgtaccagatcatccggcgaacgctgaagcaagcgttcgccgactgcacggtgatcttgtgcgagcaccggatcgaggcgatgctggagtgccagcagttcttggtcatcgaggaggccaaggtgcggcagtacgactcgatccagaagcttctggcggagagaagcctgttccggcaggctatctctccgtcagatcgggtcaagttgtttccgcaccgggcctcctcgaaatgcaagtcaaagccgcagattgcggctttgaaggaggagacggaggaggaggtacaggatactcgcttgtga

SEQ ID NO: 12 - DNA, 4443 bp, Artificial Sequence
  Description of Artificial Sequence: Synthetic polynucleotide
atgcagaggtccccccttgagaaggcatcggtcgtgtccaagctgttcttcagctggacacgaccgatccttcgcaaggggtaccgccagcgactggagctatctgatatctatcagataccttcagtcgactcggcggataatctgtccgagaagctagagcgtgaatgggatcgtgagctcgccagcaagaagaacccgaagctcataaacgcgctcagaagatgcttcttctggcgctttatgttctacgggatcttcttgtaccttggcgaggtcacgaaggccgttcagcctctgcttctcggacggattatcgctagttatgaccccgatgctaaggaggagcggtccatcgcgatatacttaggcataggcttatgcctattgtttatcgtgaggaccctcctcctgcatccggcgatcttcggtctgcaccacatcgggatgcagatgaggatcgccatgttttctttgatctataagaagacattgaagttgtcgagccgggtcctcgacaaaattagcatagggcagctggtgagcttattatcagctgccctagctaagtttgacgagggcctggctctggcacacttcgtctggatcgccccattgcaggtggcactgctaatggggctgatctgggagctgctccaggcttccgcgttctgtggtctcggatttctcatcgttctggccctgttccaggcgggactgggccggatgatgatgaagtaccgagaccagagagcggggaagatctcggagcggctggtcataactagcgagatgatcgagaacattcagagcgtgaaggcgtactgctgggaggaggccatggagaagatgattgaagcattaaggcagacggagttgaagctgacacgtaaggccgcttacgtgcggtacttcaactcctctgcctttttcttcagtggcttcttcgtggtcttcctcagcgtactgccttacgctctgatcaaggggatcatccttcgcaagatcttcacgactatcagcttctgcatcgtcctacggatggcggtgacccgccagtttccgtgggcggtgcagacctggtatgatagtcttggagccattgcgaagatccaggacttcttgcagaagcaggagtataagactctggagtacgccctcacgaccacggaggtggtgatggagaacgtcaccgccttctgggaggagggcttcggggagttgttcgagaaggccaagcaggccaacgccaatcgaaagacttcgaatggcgatgacagcttgttcttctcgaacttctccctgctgggcacgccggtcttgaaggacatcaacttcaagatcgagcgtggccagctcctggcggtggccgggagcacgggggctgggaagaccagcctcctcatggtgatcatgggggagctcgagccaagtgaagggaagatcaaacactcgggccggattagtttttgctcgcagttttcatggatcatgcccggtaccatcaaggagaacatcatctttggtgtctcctatgatgagtaccggtatcgatccgtgataaaggcctgccagctcgaggaggatatctccaagttcgccgagaaggataacatcgttctcggcgaaggaggtatcaccttgagcggcgggcagcgagcaagaattagtctggcccgagctgtttacaaggatgctgacctttacttgctcgactccccctttggttaccttgacgtactcacagagaaggagatctttgagtcctgcgtctgcaagctgatggcggccaagaccaggatcttggtcacctctaagatggagcatcttaagaaggcggacaagatcctcattctgcacgaggggagctcctacttctatgggacgttcagcgagttgcagaatcttcagcccgatttctccagtaagcttatgggctgcgattcgtttgatcagttctcagctgagcggcgcaactccattctgacggagaccttgcataggttttcgttagaaggagatgcgccggtcagctggactgagacgaagaagcagtcctttaagcagactggagaattcggggagaagagaaagaactcgatcctgaaccccatagcaagtatcaggaagttctccatcgtgcagaaaacgccgctccagatgaacggaatcgaggaggattccgacgagcctctggagcggcggctttcccttgttccggactcggaacaaggggaagccatcttgccgcgcatcagcgtgatcagcacggggccgacgctgcaggcgcggcgtcggcagtccgtgctggctctgatgacgcactctgtggcgcaagggcaggccatccatcgtaagacgaccgcgtctacgaggaaggtctcccttgcgccacaggctgcgttaacagagctggatatctacagccgccgtctctcccaggagacggggctggagatatccgaagagatcgcggaggaggacttgaaggagtgcttcttcgacgatatggagtccattccggccgtgaccacatgggcgacttatctacggtatattaccgtacataagtcattaattttcgttttgatatggtgtttagttattttccttgccgaagtggcggcgtccctagtagtcttgtggctactaggggcgacgccacttcaggacaagggaaatagcacacatagtaggaacgcgtcgtacgcggtgataatcacgtcgacgagttcctactatgtgttctacatctatgtgggggttgctgacacgttgttagcgatgggcttcttcagggggttacccctggtccatacgctgataacggtcagcaagatcctccaccataagatgttacactcggtgcttcaagcaccgatgagtacgctcgcaacattgaaggctggcggtatcctgaaccgtttcagcaaagatattgcaatactggacgacctgttgcccctgacgatcttcgacttcatccagttgttgttgatcgtcataggggcaatagcggtcgtcgcagtgttgcagccctatatctttgttgcgacggttccggttatcgtcgccttcataatgttgcgagcgtacttcctccagacgtcccagcagctgaagcaactagagagtgaaggtcggtccccgatcttcactcatctagttacttcgctgaagggactctggacgctgagggcattcggcaggcagccgtattttgagacgcttttccataaagcgctcaatttacacacggctgcctggttcttgtacctcagcacgttacggtggttccagatgaggatagagatgatctttgtcatcttctttatcgccgtgacgttcatctccatcctcaccaccggtgagggggagggccgggtcgggatcatcctgaccctggccatgaacatcatgtcaacccttcagtgggctgtcgcgagctcgatagacgtcgactcactgatgcgttcagtgagtcgcgtcttcaagttcatcgacatgcccactgaagggaaacctacgaagagcaccaagccgtacaagaacggccagctctcgaaggtaatgattattgagaacagccacgtgaagaaggacgatatatggccttcaggagggcagatgacagtgaaggacctcactgccaagtacaccgaggggggcaacgcgatcctcgaggcgatatcgttctcgatatcgcccgggcagcgcgttggcctcctcggtcgtactggcagtgggaagtccacactgttatctgccttcctgcgccttctcgccactgagggagagatccagattgatggagtctcctgggactccatcactctccagcagtggcggaaggcgttcggtgtcattccgcagaaggtgttcatcttttcggggaccttccggaaggctcttgatccctacgagcagtggagcgatcaagagatctggaaggtcgccgatgaggtgggcctgcggagtgtcatcgagcagttccccgggaagctggacttcgtccttgttgacggaggctgcgtgctgagccatgggcacaagcagctcatgtgcttagcacgcagcgtcctcagcaaggcgaagatcctgcttctcgatgagccttcagctcacctcgatccggtgacgtaccagatcattcggcgaacgctgaagcaagcgttcgccgactgcactgtgatcttgtgcgagcaccggatcgaggcgatgctggagtgccagcagttcctggtaatcgaagaagcgaaggttcggcagtacgacagcatccagaagctgttggccgagcgttcgctttttcgacaggccatatcgccttctgatcgcgtgaagctgttcccgcaccgggcctcctccaagtgtaagtcaaagccgcagattgcggctttgaaggaggagactgaggaggaggtccaggacacgcggctctaa

SEQ ID NO: 13 - DNA, 4443 bp, Artificial Sequence
  Description of Artificial Sequence: Synthetic polynucleotide
atgcagaggtccccccttgagaaggcatcggtcgtgtccaagctgttcttcagctggacacgaccgatccttcgcaaggggtaccgccagcgactggagctatctgatatctatcagataccttcagtcgactcggcggataatctgtccgagaagctagagcgtgaatgggatcgtgagctcgccagcaagaagaacccgaagctcataaacgcgctcagaagatgcttcttctggcgctttatgttctacgggatcttcttgtaccttggcgaggtcacgaaggccgttcagcctctgcttctcggacggattatcgctagttatgaccccgatgctaaggaggagcggtccatcgcgatatacttaggcataggcttatgcctattgtttatcgtgaggaccctcctcctgcatccggcgatcttcggtctgcaccacatcgggatgcagatgaggatcgccatgttttctttgatctataagaagacattgaagttgtcgagccgggtcctcgacaaaattagcatagggcagctggtgagcttattatcagctgccctagctaagtttgacgagggcctggctctggcacacttcgtctggatcgccccattgcaggtggcactgctaatggggctgatctgggagctgctccaggcttccgcgttctgtggtctcggatttctcatcgttctggccctgttccaggcgggactgggccggatgatgatgaagtaccgagaccagagagcggggaagatctcggagcggctggtcataactagcgagatgatcgagaacattcagagcgtgaaggcgtactgctgggaggaggccatggagaagatgattgaagcattaaggcagacggagttgaagctgacacgtaaggccgcttacgtgcggtacttcaactcctctgcctttttcttcagtggcttcttcgtggtcttcctcagcgtactgccttacgctctgatcaaggggatcatccttcgcaagatcttcacgactatcagcttctgcatcgtcctacggatggcggtgacccgccagtttccgtgggcggtgcagacctggtatgatagtcttggagccattgcgaagatccaggacttcttgcagaagcaggagtataagactctggagtacgccctcacgaccacggaggtggtgatggagaacgtcaccgccttctgggaggagggcttcggggagttgttcgagaaggccaagcaggccaacgccaatcgaaagacttcgaatggcgatgacagcttgttcttctcgaacttctccctgctgggcacgccggtcttgaaggacatcaacttcaagatcgagcgtggccagctcctggcggtggccgggagcacgggggctgggaagaccagcctcctcatggtgatcatgggggagctcgagccaagtgaagggaagatcaaacactcgggccggattagtttttgctcgcagttttcatggatcatgcccggtaccatcaaggagaacatcatctttggtgtctcctatgatgagtaccggtatcgatccgtgataaaggcctgccagctcgaggaggatatctccaagttcgccgagaaggataacatcgttctcggcgaaggaggtatcaccttgagcggcgggcagcgagcaagaattagtctggcccgagctgtttacaaggatgctgacctttacttgctcgactccccctttggttaccttgacgtactcacagagaaggagatctttgagtcctgcgtctgcaagctgatggcggccaagaccaggatcttggtcacctctaagatggagcatcttaagaaggcggacaagatcctcattctgcacgaggggagctcctacttctatgggacgttcagcgagttgcagaatcttcagcccgatttctccagtaagcttatgggctgcgattcgtttgatcagttctcagctgagcggcgcaactccattctgacggagaccttgcataggttttcgttagaaggagatgcgccggtcagctggactgagacgaagaagcagtcctttaagcagactggagaattcggggagaagagaaagaactcgatcctgaaccccatagcaagtatcaggaagttctccatcgtgcagaaaacgccgctccagatgaacggaatcgaggaggattccgacgagcctctggagcggcggctttcccttgttccggactcggaacaaggggaagccatcttgccgcgcatcagcgtgatcagcacggggccgacgctgcaggcgcggcgtcggcagtccgtgctggctctgatgacgcactctgtggcgcaagggcaggccatccatcgtaagacgaccgcgtctacgaggaaggtctcccttgcgccacaggctgcgttaacagagctggatatctacagccgccgtctctcccaggagacggggctggagatatccgaagagatcgcggaggaggacttgaaggagtgcttcttcgacgatatggagtccattccggccgtgaccacatgggcgacatacctgcggtatattactgtccacaagagcctcatctttgtcttgatatggtgtttagttattttccttgccgaagtggcggcgtccctagtagtcttgtggctactaggggcgacgccacttcaggacaagggaaatagcacacatagtaggaacgcgtcgtacgcggtgataatcacgtcgacgagttcctactatgtgttctacatctatgtgggggttgctgacacgttgttagcgatgggcttcttcagggggttacccctggtccatacgctgataacggtcagcaagatcctccaccataagatgttacactcggtgcttcaagcaccgatgagtacgctcgcaacattgaaggctggcggtatcctgaaccgtttcagcaaagatattgcaatactggacgacctgttgcccctgacgatcttcgacttcatccagttgttgttgatcgtcataggggcaatagcggtcgtcgcagtgttgcagccctatatctttgttgcgacggttccggttatcgtcgccttcataatgttgcgagcgtacttcctccagacgtcccagcagctgaagcaactagagagtgaaggtcggtccccgatcttcactcatctagttacttcgctgaagggactctggacgctgagggcattcggcaggcagccgtattttgagacgcttttccataaagcgctcaatttacacacggctgcctggttcttgtacctcagcacgttacggtggttccagatgaggatagagatgatctttgtcatcttctttatcgccgtgacgttcatctccatcctcaccaccggtgagggggagggccgggtcgggatcatcctgaccctggccatgaacatcatgtcaacccttcagtgggctgtcgcgagctcgatagacgtcgactcactgatgcgttcagtgagtcgcgtcttcaagttcatcgacatgcccactgaagggaagcccaccaagagtacgaagccgtacaagaatgggcagctgtccaaggtgatgattatcgagaatagtcacgtcaagaaggacgacatctggccctccggcggtcagatgaccgtgaaggatctgaccgccaagtacacggagggcgggaacgccattcttgaggcgattagcttctcgatatcacctggacagcgggtcggcctcctcggtcgcacggggtcggggaagagcactctgctgagtgcttttctccgactccttgcgaccgagggggagatccagatagatggggtctcttgggacagtattacgctgcagcagtggaggaaggccttcggggttataccccagaaggtcttcatattctccgggaccttccggaaggctcttgatccctacgagcagtggagcgatcaagagatctggaaggtcgcggacgaagttggactgcgctcggtgatagagcagttccccgggaagttggactttgtcttggtcgatggagggtgcgttctgagccacggccataagcagcttatgtgcctggctcggagcgtactctccaaggccaagatattgctgctggacgagcccagcgctcacctcgatccggtgacgtaccagatcattcggcgaacgctgaagcaagcgttcgccgactgcactgtgatcttgtgcgagcaccggatcgaggcgatgctggagtgccagcagttcctggtgatcgaagaggctaaggtccgccagtatgattcgatccagaagttactggcggagcgtagcctcttccgccaggccatcagtccaagtgaccgggtgaagctgttccctcaccgagcgtcgtccaagtgtaagtcaaagccgcagattgcggctttgaaagaagaaacagaggaggaggtccaggacacccgcctctga

SEQ ID NO: 14 - DNA, 4443 bp, Artificial Sequence
  Description of Artificial Sequence: Synthetic polynucleotide
atgcagagatcgccgctggagaaggcttcggtcgtgtccaagctgttcttcagctggacacgaccgatccttcgcaaggggtaccgccagcgactggagctatctgatatctatcagataccttcagtcgactcggcggataatctgtccgagaagctagagcgtgaatgggatcgtgagctcgccagcaagaagaacccgaagctcataaacgcgctcagaagatgcttcttctggcgctttatgttctacgggatcttcttgtaccttggcgaggtcacgaaggccgttcagcctctgcttctcggacggattatcgctagttatgaccccgatgctaaggaggagcggtccatcgcgatatacttaggcataggcttatgcctattgtttatcgtgaggaccctcctcctgcatccggcgatcttcggtctgcaccacatcgggatgcagatgaggatcgccatgttttctttgatctataagaagacattgaagttgtcgagccgggtcctcgacaaaattagcatagggcagctggtgagcttattatcagctgccctagctaagtttgacgagggcctggctctggcacacttcgtctggatcgccccattgcaggtggcactgctaatggggctgatctgggagctgctccaggcttccgcgttctgtggtctcggatttctcatcgttctggccctgttccaggcgggactgggccggatgatgatgaagtaccgagaccagagagcggggaagatctcggagcggctggtcataactagcgagatgatcgagaacattcagagcgtgaaggcgtactgctgggaggaggccatggagaagatgattgaagcattaaggcagacggagttgaagctgacacgtaaggccgcttacgtgcggtacttcaactcctctgcctttttcttcagtggcttcttcgtggtcttcctcagcgtactgccttacgctctgatcaaggggatcatccttcgcaagatcttcacgactatcagcttctgcatcgtcctacggatggcggtgacccgccagtttccgtgggcggtgcagacctggtatgatagtcttggagccattgcgaagatccaggacttcttgcagaagcaggagtataagactctggagtacgccctcacgaccacggaggtggtgatggagaacgtcaccgccttctgggaggagggcttcggggagttgttcgagaaggccaagcaggccaacgccaatcgaaagacttcgaatggcgatgacagcttgttcttctcgaacttctccctgctgggcacgccggtcttgaaggacatcaacttcaagatcgagcgtggccagctcctggcggtggccgggagcacgggggctgggaagaccagcctcctcatggtgatcatgggggagctcgagccaagtgaagggaagatcaaacactcgggccggattagtttttgctcgcagttttcatggatcatgcccggtaccatcaaggagaacatcatctttggtgtctcctatgatgagtaccggtatcgatccgtgataaaggcctgccagctcgaggaggatatctccaagttcgccgagaaggataacatcgttctcggcgaaggaggtatcaccttgagcggcgggcagcgagcaagaattagtctggcccgagctgtttacaaggatgctgacctttacttgctcgactccccctttggttaccttgacgtactcacagagaaggagatctttgagtcctgcgtctgcaagctgatggcggccaagaccaggatcttggtcacctctaagatggagcatcttaagaaggcggacaagatcctcattctgcacgaggggagctcctacttctatgggacgttcagcgagttgcagaatcttcagcccgatttctccagtaagcttatgggctgcgattcgtttgatcagttctcagctgagcggcgcaactccattctgacggagaccttgcataggttttcgttagaaggagatgcgccggtcagctggactgagacgaagaagcagtcctttaagcagactggagaattcggggagaagagaaagaactcgatcctgaaccccatagcaagtatcaggaagttctccatcgtgcagaaaacgccgctccagatgaacggaatcgaggaggattccgacgagcctctggagcggcggctttcccttgttccggactcggaacaaggggaagccatcttgccgcgcatcagcgtgatcagcacggggccgacgctgcaggcgcggcgtcggcagtccgtgctggctctgatgacgcactctgtggcgcaagggcaggccatccatcgtaagacgaccgcgtctacgaggaaggtctcccttgcgccacaggctgcgttaacagagctggatatctacagccgccgtctctcccaggagacggggctggagatatccgaagagatcgcggaggaggacttgaaggagtgcttcttcgacgatatggagtccattccggccgtgaccacatgggcgacatacctgcggtatattactgtccacaagagcctcatctttgtcttgatatggtgtttagttattttccttgccgaagtggcggcgtccctagtagtcttgtggctactaggggcgacgccacttcaggacaagggaaatagcacacatagtaggaacgcgtcgtacgcggtgataatcacgtcgacgagttcctactatgtgttctacatctatgtgggggttgctgacacgttgttagcgatgggcttcttcagggggttacccctggtccatacgctgataacggtcagcaagatcctccaccataagatgttacactcggtgcttcaagcaccgatgagtacgctcgcaacattgaaggctggcggtatcctgaaccgtttcagcaaagatattgcaatactggacgacctgttgcccctgacgatcttcgacttcatccagttgttgttgatcgtcataggggcaatagcggtcgtcgcagtgttgcagccctatatctttgttgcgacggttccggttatcgtcgccttcataatgttgcgagcgtacttcctccagacgtcccagcagctgaagcaactagagagtgaaggtcggtccccgatcttcactcatctagttacttcgctgaagggactctggacgctgagggcattcggcaggcagccgtattttgagacgcttttccataaagcgctcaatttacacacggctgcctggttcttgtacctcagcacgttacggtggttccagatgaggatagagatgatctttgtcatcttctttatcgccgtgacgttcatctccatcctcaccaccggtgagggggagggccgggtcgggatcatcctgaccctggccatgaacatcatgtcaacccttcagtgggctgtcgcgagctcgatagacgtcgactcactgatgcgttcagtgagtcgcgtcttcaagttcatcgacatgcccactgaagggaagcccaccaagagtacgaagccgtacaagaatgggcagctgtccaaggtgatgattatcgagaatagtcacgtcaagaaggacgacatctggccctccggcggtcagatgaccgtgaaggatctgaccgccaagtacacggagggcgggaacgccattcttgaggcgattagcttctcgatatcacctggacagcgggtcggcctcctcggtcgcacggggtcggggaagagcactctgctgagtgcttttctccgactccttgcgaccgagggggagatccagatagatggggtctcttgggacagtattacgctgcagcagtggaggaaggccttcggggttataccccagaaggtcttcatattctccgggaccttccggaaggctcttgatccctacgagcagtggagcgatcaagagatctggaaggtcgcggacgaagttggactgcgctcggtgatagagcagttccccgggaagttggactttgtcttggtcgatggagggtgcgttctgagccacggccataagcagcttatgtgcctggctcggagcgtactctccaaggccaagatattgctgctggacgagcccagcgctcacctcgatccggtgacgtaccagatcattcggcgaacgctgaagcaagcgttcgccgactgcactgtgatcttgtgcgagcaccggatcgaggcgatgctggagtgccagcagttcctggtgatcgaagaggctaaggtccgccagtatgattcgatccagaagttattggccgagcgaagccttttccggcaggcgatctctccaagcgaccgggtgaagctgtttcctcatcgggcctcctccaagtgcaagtcaaagccgcagattgcggctttgaaggaggagaccgaggaggaagtgcaggacacccggttgtaa

SEQ ID NO: 15 - DNA, 4398 bp, Homo sapiens
atgcctgagcaggagagacagatcacagccagagaaggggccagtcggaaaatcttatctaagctttctttgcctacccgtgcctgggaaccagcaatgaagaagagttttgcttttgacaatgttggctatgaaggtggtctggatggcctgggcccttcttctcaggtggccaccagcacagtcaggatcttgggcatgacttgccagtcatgtgtgaagtccattgaggacaggatttccaatttgaaaggcatcatcagcatgaaggtttccctggaacaaggcagtgccactgtgaaatatgtgccatcggttgtgtgcctgcaacaggtttgccatcaaattggggacatgggcttcgaggccagcattgcagaaggaaaggcagcctcctggccctcaaggtccttgcctgcccaggaggctgtggtcaagctccgggtggagggcatgacctgccagtcctgtgtcagctccattgaaggcaaggtccggaaactgcaaggagtagtgagagtcaaagtctcactcagcaaccaagaggccgtcatcacttatcagccttatctcattcagcccgaagacctcagggaccatgtaaatgacatgggatttgaagctgccatcaagagcaaagtggctcccttaagcctgggaccaattgatattgagcggttacaaagcactaacccaaagagacctttatcttctgctaaccagaattttaataattctgagaccttggggcaccaaggaagccatgtggtcaccctccaactgagaatagatggaatgcattgtaagtcttgcgtcttgaatattgaagaaaatattggccagctcctaggggttcaaagtattcaagtgtccttggagaacaaaactgcccaagtaaagtatgacccttcttgtaccagcccagtggctctgcagagggctatcgaggcacttccacctgggaattttaaagtttctcttcctgatggagccgaagggagtgggacagatcacaggtcttccagttctcattcccctggctccccaccgagaaaccaggtccagggcacatgcagtaccactctgattgccattgccggcatgacctgtgcatcctgtgtccattccattgaaggcatgatctcccaactggaaggggtgcagcaaatatcggtgtctttggccgaagggactgcaacagttctttataatccctctgtaattagcccagaagaactcagagctgctatagaagacatgggatttgaggcttcagtcgtttctgaaagctgttctactaaccctcttggaaaccacagtgctgggaattccatggtgcaaactacagatggtacacctacatctgtgcaggaagtggctccccacactgggaggctccctgcaaaccatgccccggacatcttggcaaagtccccacaatcaaccagagcagtggcaccgcagaagtgcttcttacagatcaaaggcatgacctgtgcatcctgtgtgtctaacatagaaaggaatctgcagaaagaagctggtgttctctccgtgttggttgccttgatggcaggaaaggcagagatcaagtatgacccagaggtcatccagcccctcgagatagctcagttcatccaggacctgggttttgaggcagcagtcatggaggactacgcaggctccgatggcaacattgagctgacaatcacagggatgacctgcgcgtcctgtgtccacaacatagagtccaaactcacgaggacaaatggcatcacttatgcctccgttgcccttgccaccagcaaagcccttgttaagtttgacccggaaattatcggtccacgggatattatcaaaattattgaggaaattggctttcatgcttccctggcccagagaaaccccaacgctcatcacttggaccacaagatggaaataaagcagtggaagaagtctttcctgtgcagcctggtgtttggcatccctgtcatggccttaatgatctatatgctgatacccagcaacgagccccaccagtccatggtcctggaccacaacatcattccaggactgtccattctaaatctcatcttctttatcttgtgtacctttgtccagctcctcggtgggtggtacttctacgttcaggcctacaaatctctgagacacaggtcagccaacatggacgtgctcatcgtcctggccacaagcattgcttatgtttattctctggtcatcctggtggttgctgtggctgagaaggcggagaggagccctgtgacattcttcgacacgccccccatgctctttgtgttcattgccctgggccggtggctggaacacttggcaaagagcaaaacctcagaagccctggctaaactcatgtctctccaagccacagaagccaccgttgtgacccttggtgaggacaatttaatcatcagggaggagcaagtccccatggagctggtgcagcggggcgatatcgtcaaggtggtccctgggggaaagtttccagtggatgggaaagtcctggaaggcaataccatggctgatgagtccctcatcacaggagaagccatgccagtcactaagaaacccggaagcactgtaattgcggggtctataaatgcacatggctctgtgctcattaaagctacccacgtgggcaatgacaccactttggctcagattgtgaaactggtggaagaggctcagatgtcaaaggcacccattcagcagctggctgaccggtttagtggatattttgtcccatttatcatcatcatgtcaactttgacgttggtggtatggattgtaatcggttttatcgattttggtgttgttcagagatactttcctaaccccaacaagcacatctcccagacagaggtgatcatccggtttgctttccagacgtccatcacggtgctgtgcattgcctgcccctgctccctggggctggccacgcccacggctgtcatggtgggcaccggggtggccgcgcagaacggcatcctcatcaagggaggcaagcccctggagatggcgcacaagataaagactgtgatgtttgacaagactggcaccattacccatggcgtccccagggtcatgcgggtgctcctgctgggggatgtggccacactgcccctcaggaaggttctggctgtggtggggactgcggaggccagcagtgaacaccccttgggcgtggcagtcaccaaatactgtaaagaggaacttggaacagagaccttgggatactgcacggacttccaggcagtgccaggctgtggaattgggtgcaaagtcagcaacgtggaaggcatcctggcccacagtgagcgccctttgagtgcaccggccagtcacctgaatgaggctggcagccttcccgcagaaaaagatgcagtcccccagaccttctctgtgctgattggaaaccgtgagtggctgaggcgcaacggtttaaccatttctagcgatgtcagtgacgctatgacagaccacgagatgaaaggacagacagccatcctggtggctattgacggtgtgctctgtgggatgatcgcaatcgcagacgctgtcaagcaggaggctgccctggctgtgcacacgctgcagagcatgggtgtggacgtggttctgatcacgggggacaaccggaagacagccagagctattgccacccaggttggcatcaacaaagtctttgcagaggtgctgccttcgcacaaggtggccaaggtccaggagctccagaataaagggaagaaagtcgccatggtgggggatggggtcaatgactccccggccttggcccaggcagacatgggtgtggccattggcaccggcacggatgtggccatcgaggcagccgacgtcgtccttatcagaaatgatttgctggatgtggtggctagcattcacctttccaagaggactgtccgaaggatacgcatcaacctggtcctggcactgatttataacctggttgggatacccattgcagcaggtgtcttcatgcccatcggcattgtgctgcagccctggatgggctcagcggccatggcagcctcctctgtgtctgtggtgctctcatccctgcagctcaagtgctataagaagcctgacctggagaggtatgaggcacaggcgcatggccacatgaagcccctgacggcatcccaggtcagtgtgcacataggcatggatgacaggtggcgggactcccccagggccacaccatgggaccaggtcagctatgtcagccaggtgtcgctgtcctccctgacgtccgacaagccatctcggcacagcgctgcagcagacgatgatggggacaagtggtctctgctcctgaatggcagggatgaggagcagtacatctga

SEQ ID NO: 16 - DNA, 4503 bp, Homo sapiens
atggatccaagtatgggtgtgaattctgttaccatttctgttgagggtatgacttgcaattcctgtgtttggaccattgagcagcagattggaaaagtgaatggtgtgcatcacattaaggtatcactggaagaaaaaaatgcaactattatttatgaccctaaactacagactccaaagaccctacaggaagctattgatgacatgggctttgatgctgttatccataatcctgaccctctccctgttttaactgacaccttgtttctgactgttacggcgtcactgactttgccatgggaccatatccaaagcacattgctgaagaccaagggtgtgacagacattaaaatttaccctcagaaaagaactgtagcagtgacaataatcccttctatagtgaatgccaatcagataaaagagctggttccagaactcagtttagatactgggacactggagaaaaagtcaggagcttgtgaagatcatagtatggctcaagctggtgaagtcgtgctgaagatgaaagtggaagggatgacctgccattcatgtactagcactattgaaggaaaaattgggaaactgcaaggtgttcagcgaattaaagtctccctggacaatcaagaagctactattgtttatcaacctcatcttatctcagtagaggaaatgaaaaagcagattgaagctatgggctttccagcatttgtcaaaaagcagcccaagtacctcaaattgggagctattgatgtagaacgtctaaagaacacaccagttaaatcctcagaagggtcacagcaaaggagtccatcatataccaatgattcaacagccactttcatcattgatggcatgcattgtaaatcatgtgtgtcaaatattgaaagtactttatctgcactccaatatgtaagcagcatagtagtttctttagagaataggtctgccattgtgaagtataatgcaagctcagtcactccagaatccctgagaaaagcaatagaggctgtatcaccggggctatatagagttagtatcacaagtgaagttgagagtacctcaaactctccctccagctcatctcttcagaagattcctttgaatgtagttagccagcctctgacacaagaaactgtgataaacattgatggcatgacttgtaattcctgtgtgcagtctattgagggtgtcatatcaaaaaagccaggtgtaaaatccatacgagtctcccttgcaaatagcaatgggactgttgagtatgatcctctactaacctctccagaaacgttgagaggagcaatagaagacatgggatttgatgctaccttgtcagacacgaatgagccgttggtagtaatagctcagccttcatcggaaatgccgcttttgacttcaactaatgaattttatactaaagggatgacaccagttcaagacaaggaggaaggaaagaattcatctaagtgttacatacaggtcactggcatgacttgcgcttcctgtgtagcaaacattgaacggaatttaaggcgggaagaaggaatatattctatacttgtggccctgatggctggcaaggcagaagtaaggtataatcctgctgttatacaacccccaatgatagcagagttcatccgagaacttggatttggagccactgtgatagaaaatgctgatgaaggagatggtgttttggaacttgttgtgaggggaatgacgtgtgcctcctgcgtacataaaatagagtctagtctcacaaaacacagagggatcctatactgctccgtggccctggcaaccaacaaagcacatattaaatatgacccagaaattattggtcctagagatattatccatacaattgaaagcttaggttttgaagcttctttggtcaagaaggatcggtcagcaagtcacttagatcataaacgagaaataagacaatggagacggtcttttcttgtgagtctgtttttctgtattcctgtaatggggctgatgatatatatgatggttatggaccaccactttgcaactcttcaccataatcaaaacatgagtaaagaagaaatgatcaaccttcattcttctatgttcctggagcgccagattcttccaggattgtctgttatgaatttgctgtcctttttattgtgtgtacctgtacagtttttcggaggctggtacttctacattcaggcttataaagcactgaagcataagacagcaaatatggacgtactgattgtgctggcaaccaccattgcatttgcctactctttgattattcttctagttgcaatgtatgagagagccaaagtgaaccctattactttctttgacacaccccctatgctgtttgtgtttattgcactaggccgatggctggaacatatagcaaagggcaaaacatcagaggctcttgcaaagttaatttcactacaagctacagaagcaactattgtaactcttgattctgataatatcctcctcagtgaagaacaagtggatgtggaacttgtacaacgtggagatatcattaaagtagttccaggaggcaaatttccagtggatggtcgtgttattgaaggacattctatggtagatgagtccctcatcacaggggaggcaatgcctgtggctaagaaacctggcagcacagtgattgctggttccattaaccagaacgggtcactgcttatctgcgcaacacatgttggagcagacacaaccctttctcaaattgtcaaacttgtggaagaggcacaaacatcaaaggctcctatccagcagtttgcagacaaactcagtggctattttgttccttttattgtttttgtttccattgccaccctcttggtatggattgtaattggatttctgaattttgaaattgtggaaacctactttcctggctacaatagaagtatctcccgaacagaaacgataatacgatttgctttccaagcctctatcacagttctgtgtattgcatgtccctgttcactgggactggccactccaactgctgtgatggtgggtacaggagtaggtgctcaaaatggcatactaataaaaggtggagagccattggagatggctcataaggtaaaggtagtggtatttgataagactggaaccattactcacggaaccccagtggtgaatcaagtaaaggttctaactgaaagtaacagaatatcacaccataaaatcttggccattgtgggaactgctgaaagtaacagtgaacaccctctaggaacagccataaccaaatattgcaaacaggagctggacactgaaaccttgggtacctgcatagatttccaggttgtgccaggctgtggtattagctgtaaagtcaccaatattgaaggcttgctacataagaataactggaatatagaggacaataatattaaaaatgcatccctggttcaaattgatgccagtaatgaacagtcatcaacttcgtcttccatgattattgatgcccagatctcaaatgctcttaatgctcagcagtataaagtcctcattggtaaccgggagtggatgattagaaatggtcttgtcattaataacgatgtaaatgatttcatgactgaacatgagagaaaaggtcggactgctgtattagtagcagttgatgatgagctgtgtggcttgatagccattgcagacacagtgaagcctgaagcagaactggctatccatattctgaaatctatgggcttagaagtagttctgatgactggagacaacagtaaaacagctagatctattgcttctcaggttggcattactaaggtgtttgctgaagttctaccttctcacaaggttgctaaagtgaagcaacttcaagaggaggggaaacgggtagcaatggtgggagatggaatcaatgactccccagctctggcaatggctaatgtgggaattgctattggcacaggcacagatgtagccattgaagcagctgatgtggttttgataaggaatgatcttctggatgtagtggcaagtattgacttatcaagaaagacagtcaagaggattcggataaattttgtctttgctctaatttataatctggttggaattcccatagctgctggagtttttatgcccattggtttggttttgcagccctggatgggatctgcagcaatggctgcttcatctgtttctgtagtactttcttctctcttccttaaactttacaggaaaccaacttacgagagttatgaactgcctgcccggagccagataggacagaagagtccttcagaaatcagcgttcatgttggaatagatgatacctcaaggaattctcctaaactgggtttgctggaccggattgttaattatagcagagcctctataaactcactactgtctgataaacgctccctaaacagtgttgttaccagtgaacctgacaagcactcactcctggtgggagacttcagggaagatgatgacactgcattataa

SEQ ID NO: 17 - DNA, 4599 bp, Homo sapiens
atgggacacagtaaacagattcgaattttacttctgaacgaaatggagaaactggaaaagaccctcttcagacttgaacaagggtatgagctacagttccgattaggcccaactttacagggaaaagcagttaccgtgtatacaaattacccatttcctggagaaacatttaatagagaaaaattccgttctctggattgggaaaatccaacagaaagagaagatgattctgataaatactgtaaacttaatctgcaacaatctggttcatttcagtattatttccttcaaggaaatgagaaaagtggtggaggttacatagttgtggaccccattttacgtgttggtgctgataatcatgtgctacccttggactgtgttactcttcagacatttttagctaagtgtttgggaccttttgatgaatgggaaagcagacttagggttgcaaaagaatcaggctacaacatgattcattttaccccattgcagactcttggactatctaggtcatgctactcccttgccaatcagttagaattaaatcctgacttttcaagacctaatagaaagtatacctggaatgatgttggacagctagtggaaaaattaaaaaaggaatggaatgttatttgtattactgatgttgtctacaatcatactgctgctaatagtaaatggatccaggaacatccagaatgtgcctataatcttgtgaattctccacacttaaaacctgcctgggtcttagacagagcactttggcgtttctcctgtgatgttgcagaagggaaatacaaagaaaagggaatacctgctttgattgaaaatgatcaccatatgaattccatccgaaaaataatttgggaggatatttttccaaagcttaaactctgggaatttttccaagtagatgtcaacaaagcggttgagcaatttagaagacttcttacacaagaaaataggcgagtaaccaagtctgatccaaaccaacaccttacgattattcaagatcctgaatacagacggtttggctgtactgtagatatgaacattgcactaacgactttcataccacatgacaaggggccagcagcaattgaagaatgctgtaattggtttcataaaagaatggaggaattaaattcagagaagcatcgactcattaactatcatcaggaacaggcagttaattgccttttgggaaatgtgttttatgaacgactggctggccatggtccaaaactaggacctgtcactagaaagcatcctttagttaccaggtattttactttcccatttgaagagatagacttctccatggaagaatctatgattcatctgccaaataaagcttgttttctgatggcacacaatggatgggtaatgggagatgatcctcttcgaaactttgctgaaccgggttcagaagtttacctaaggagagaacttatttgctggggagacagtgttaaattacgctatgggaataaaccagaggactgtccttatctctgggcacacatgaaaaaatacactgaaataactgcaacttatttccagggagtacgtcttgataactgccactcaacacctcttcacgtagctgagtacatgttggatgctgctaggaatttgcaacccaatttatatgtagtagctgaactgttcacaggaagtgaagatctggacaatgtctttgttactagactgggcattagttccttaataagagaggcaatgagtgcatataatagtcatgaagagggcagattagtttaccgatatggaggagaacctgttggatcctttgttcagccctgtttgaggcctttaatgccagctattgcacatgccctgtttatggatattacgcatgataatgagtgtcctattgtgcatagatcagcgtatgatgctcttccaagtactacaattgtttctatggcatgttgtgctagtggaagtacaagaggctatgatgaattagtgcctcatcagatttcagtggtttctgaagaacggttttacactaagtggaatcctgaagcattgccttcaaacacaggtgaagttaatttccaaagcggcattattgcagccaggtgtgctatcagtaaacttcatcaggagcttggagccaagggttttattcaggtgtatgtggatcaagttgatgaagacatagtggcagtaacaagacactcacctagcatccatcagtctgttgtggctgtatctagaactgctttcaggaatcccaagacttcattttacagcaaggaagtgcctcaaatgtgcatccctggcaaaattgaagaagtagttcttgaagctagaactattgagagaaacacgaaaccttataggaaggatgagaattcaatcaatggaacaccagatatcacagtagaaattagagaacatattcagcttaatgaaagtaaaattgttaaacaagctggagttgccacaaaagggcccaatgaatatattcaagaaatagaatttgaaaacttgtctccaggaagtgttattatattcagagttagtcttgatccacatgcacaagtcgctgttggaattcttcgaaatcatctgacacaattcagtcctcactttaaatctggcagcctagctgttgacaatgcagatcctatattaaaaattccttttgcttctcttgcctccagattaactttggctgagctaaatcagatcctttaccgatgtgaatcagaagaaaaggaagatggtggagggtgctatgacataccaaactggtcagcccttaaatatgcaggtcttcaaggtttaatgtctgtattggcagaaataagaccaaagaatgacttggggcatcctttttgtaataatttgagatctggagattggatgattgactatgtcagtaaccggcttatttcacgatcaggaactattgctgaagttggtaaatggttgcaggctatgttcttctacctgaagcagatcccacgttaccttatcccatgttactttgatgctatattaattggtgcatataccactcttctggatacagcatggaagcagatgtcaagctttgttcagaatggttcaacctttgtgaaacacctttcattgggttcagttcaactgtgtggagtaggaaaattcccttccctgccaattctttcacctgccctaatggatgtaccttataggttaaatgagatcacaaaagaaaaggagcaatgttgtgtttctctagctgcaggcttacctcatttttcttctggtattttccgctgctggggaagggatacttttattgcacttagaggtatactgctgattactggacgctatgtagaagccaggaatattattttagcatttgcgggtaccctgaggcatggtctcattcctaatctactgggtgaaggaatttatgccagatacaattgtcgggatgctgtgtggtggtggctgcagtgtatccaggattactgtaaaatggttccaaatggtctagacattctcaagtgcccagtttccagaatgtatcctacagatgattctgctcctttgcctgctggcacactggatcagccattgtttgaagtcatacaggaagcaatgcaaaaacacatgcagggcatacagttccgagaaaggaatgctggtccccagatagatcgaaacatgaaggacgaaggttttaatataactgcaggagttgatgaagaaacaggatttgtttatggaggaaatcgtttcaattgtggcacatggatggataaaatgggagaaagtgacagagctagaaacagaggaatcccagccacaccaagagatgggtctgctgtggaaattgtgggcctgagtaaatctgctgttcgctggttgctggaattatccaaaaaaaatattttcccttatcatgaagtcacagtaaaaagacatggaaaggctataaaggtctcatatgatgagtggaacagaaaaatacaagacaactttgaaaagctatttcatgtttccgaagacccttcagatttaaatgaaaagcatccaaatctggttcacaaacgtggcatatacaaagatagttatggagcttcaagtccttggtgtgactatcagctcaggcctaattttaccatagcaatggttgtggcccctgagctctttactacagaaaaagcatggaaagctttggagattgcagaaaaaaaattgcttggtccccttggcatgaaaactttagatccagatgatatggtttactgtggaatttatgacaatgcattagacaatgacaactacaatcttgctaaaggtttcaattatcaccaaggacctgagtggctgtggcctattgggtattttcttcgtgcaaaattatatttttccagattgatgggcccggagactactgcaaagactatagttttggttaaaaatgttctttcccgacattatgttcatcttgagagatccccttggaaaggacttccagaactgaccaatgagaatgcccagtactgtcctttcagctgtgaaacacaagcctggtcaattgctactattcttgagacactttatgatttatag

SEQ ID NO: 18 - DNA, 5953 bp, Homo sapiens
atgctttggtgggaagaagtagaggactgttatgaaagagaagatgttcaaaagaaaacattcacaaaatgggtaaatgcacaattttctaagtttgggaagcagcatattgagaacctcttcagtgacctacaggatgggaggcgcctcctagacctcctcgaaggcctgacagggcaaaaactgccaaaagaaaaaggatccacaagagttcatgccctgaacaatgtcaacaaggcactgcgggttttgcagaacaataatgttgatttagtgaatattggaagtactgacatcgtagatggaaatcataaactgactcttggtttgatttggaatataatcctccactggcaggtcaaaaatgtaatgaaaaatatcatggctggattgcaacaaaccaacagtgaaaagattctcctgagctgggtccgacaatcaactcgtaattatccacaggttaatgtaatcaacttcaccaccagctggtctgatggcctggctttgaatgctctcatccatagtcataggccagacctatttgactggaatagtgtggtttggcagcagtcagccacacaacgactggaacatgcattcaacatcgccagatatcaattaggcatagagaaagtactcgatcctgaagatgttgataccacctatccagataagaagtccatcttaatgtacatcacatcactcttccaagttttgcctcaacaagtgagcattgaagccatccaggaagtggaaatgttgccaaggccacctaaagtgactaaagaagaacattttcagtacatcatcaaatgcactattctcaacagatcacggtcagtctagcacagggatatgagagaacttcttcccctaagcctcgattcaagagctatgcctacacacaggctgcttatgtcaccacctctgaccctacacggagcccatttccttcacagcatttggaagctcctgaagacaagtcatttggcagttcattgatggagagtgaagtaaacctggaccgttatcaaacagctttagaagaagtattatcgtggcttctttctgctgaggacacattgcaagcacaaggagagatttctaatgatgtggaagtggtgaaagaccagtttcatactcatgaggggtacatgatggatttgacagcccatcagggccgggttggtaatattctacaattgggaagtaagctgattggaacaggaaaattatcagaagatgaagaaactgaagtacaagagcagatgaatctcctaaattcaagatgggaatgcctcagggtagctagcatggaaaaacaaagcaatttacatagagttttaatggatctccagaatcagaaactgaaagagttgaatgactggctaacaaaaacagaagaaagaacaaggaaaatggaggaagagcctcttggacctgatcttgaagacctaaaacgccaagtacaacaacataaggtgcttcaagaagatctagaacaagaacaagtcagggtcaattctctcactcacatggtggtggtagttgatgaatctagtggagatcacgcaactgctgctttggaagaacaagtttaaggtattgggagatcgatgggcaaacatctgtagatggacagaagaccgctgggttcttttacaagacatccttctcaaatggcaacgtcttactgaagaacagtgcctttttagtgcatggctttcagaaaaagaagatgcagtgaacaagattcacacaactggctttaaagatcaaaatgaaatgttatcaagtcttcaaaaactggccgttttaaaagcggatctagaaaagaaaaagcaatccatgggcaaactgtattcactcaaacaagatcttctttcaacactgaagaataagtcagtgacccagaagacggaagcatggctggataactttgcccggtgttgggataatttagtccaaaaacttgaaaagagtacagcacaggaaactgaaatagcagttcaagctaaacaaccggatgtggaagagattttgtctaaagggcagcatttgtacaaggaaaaaccagccactcagccagtgaagaggaagttagaagatctgagctctgagtggaaggcggtaaaccgtttacttcaagagctgagggcaaagcagcctgacctagctcctggactgaccactattggagcctctcctactcagactgttactctggtgacacaacctgtggttagtaaggaaactgccatctccaaactagaaatgccatcttccttgatgttggaggtacctgctctggcagatttcaacggggcttggacagaacttaccgagtggctttctctgcttgatcaagttataaaatcacagagggtgatggtgggtgaccttgaggatatcaacgagatgatcatcaagcagaaggcaacaatgcaggatttggaacagaggcgtccccagttggaagaactcattaccgctgcccaaaatttgaaaaacaagaccagcaatcaagaggctagaacaatcattacggatcgaattgaaagaattcagaatcagtgggatgaagtacaagaacaccttcagaaccggaggcaacagttgaatgaaatgttaaaggattcaacacaatggctggaagctaaggaagaagctgagcaggtcttaggacagggcagagccaagcttgagtcatggaaggagggtccctatacagtagatgcaatccaaaagaaaatcacagaaaccaagcagttggccaaagacctccgccagtggcagacaaatgtagatgtggcaaatgacttggccctgaaacttctccgggattattctgcagatgataccagaaaagtccacatgataacagagaatatcaatgcctcttggagaagcattcataaaagggtgagtgagcgagaggctgctttggaagaaactcatagattactgcaacagttccccctggacctggaaaagtttcttgcctggcttacagaagctgaaacaactgccaatgtcctacaggatgctacccgtaaggaaaggctcctagaagactccaagggagtaaaagagctgatgaaacaatggcaagacctccaaggtgaaattgaagctcacacagatgtttatcacaacctggatgaaaacagccaaaaaatcctgagatccctggaaggttccgatgatgcagtcctgttacaaagacgtttggataacatgaacttcaagtggagtgaacttcggaaaaagtctctcaacattaggtcccatttggaagccagttctgaccagtggaagcgtctgcacctttctctgcaggaacttctggtgtggctacagctgaaagatgatgaattaagccggcaggcacctattggaggcgactttccagcagttcagaagcagaacgatgtacatagggccttcaagagggaattgaaaactaaagaacctgtaatcatgagtactcttgagactgtacgaatatttctgacagagcagcctttggaaggactagagaaactctaccaggagcccagagagctgcctcctgaggagagagcccagaatgtcactcggcttctacgaaagcaggctgaggaggtcaatactgagtgggaaaaattgaacctgcactccgctgactggcagagaaaaatagatgagacccttgaaagactccaggaacttcaagaggccacggatgagctggacctcaagctgcgccaagctgaggtgatcaagggatcctggcagcccgtgggcgatctcctcattgactctctccaagatcacctcgagaaagtcaaggcacttcgaggagaaattgcgcctctgaaagagaacgtgagccacgtcaatgaccttgctcgccagcttaccactttgggcattcagctctcaccgtataacctcagcactctggaagacctgaacaccagatggaagcttctgcaggtggccgtcgaggaccgagtcaggcagctgcatgaagcccacagggactttggtccagcatctcagcactttctttccacgtctgtccagggtcggtgggagagagccatctcgccaaacaaagtgccctactatatcaaccacgagactcaaacaacttgctgggaccatcccaaaatgacagagctctaccagtctttagctgacctgaataatgtcagattctcagcttataggactgccatgaaactccgaagactgcagaaggccctttgcttggatctcttgagcctgtcagctgcatgtgatgccttggaccagcacaacctcaagcaaaatgaccagcccatggatatcctgcagattattaattgtttgaccactatttatgaccgcctggagcaagagcacaacaatttggtcaacgtccctctctgcgtggatatgtgtctgaactggctgctgaatgtttatgatacgggacgaacagggaggatccgtgtcctgtcttttaaaactggcatcatttccctgtgtaaagcacatttggaagacaagtacagataccttttcaagcaagtggcaagttcaacaggattttgtgaccagcgcaggctgggcctccttctgcatgattctatccaaattccaagacagttgggtgaagttgcatcctttgggggcagtaacattgagccaagtgtccggagctgcttccaatttgctaataataagccagagatcgaagcggccctcttcctagactggatgagactggaaccccagtccatggtgtggctgcccgtcctgcacagagtggctgctgcagaaactgccaagcatcaggccaaatgtaacatctgcaaagagtgtccaatcattggattcaggtacaggagtctaaagcactttaattatgacatctgccaaagctgctttttttctggtcgagttgcaaaaggccataaaatgcactatcccatggtggaatattgcactccgactacatcaggagaagatgttcgagactttgccaaggtactaaaaaacaaatttcgaaccaaaaggtattttgcgaagcatccccgaatgggctacctgccagtgcagactgtcttagagggggacaacatggaaactcccgttactctgatcaacttctggccagtagattctgcgcctgcctcgtcccctcagctttcacacgatgatactcattcacgcattgaacattatgctagcaggctagcagaaatggaaaacagcaatggatcttatctaaatgatagcatctctcctaatgagagcatagatgatgaacatttgttaatccagcattactgccaaagtttgaaccaggactcccccctgagccagcctcgtagtcctgcccagatcttgatttccttagagagtgaggaaagaggggagctagagagaatcctagcagatcttgaggaagaaaacaggaatctgcaagcagaatatgaccgtctaaagcagcagcacgaacataaaggcctgtccccactgccgtcccctcctgaaatgatgcccacctctccccagagtccccgggatgctgagctcattgctgaggccaagctactgcgtcaacacaaaggccgcctggaagccaggatgcaaatcctggaagaccacaataaacagctggagtcacagttacacaggctaaggcaggtgctggagcaaccccaggcagaggccaaagtgaatggcacaacggtgtcctctccttctacctctctacagaggtccgacagcagtcagcctatgctgctccgagtggttggcagtcaaacttcggactccatgggtgaggaagatcttctcagtcgtccccaggacacaagcacagggttagaggaggtgatggagcaactcaacaactcctttccctagttcaagaggaagaaatacccctggaaagccaatgagagaggacacaatgtag

SEQ ID NO: 19 - DNA, 2523 bp, Homo sapiens
agacctttgagcaaccttcaccgcacagaaacccagccgcgccctgcaattcccaccgcggaaggtgccgaccaacccccaggatggcggaagctcaccaggccgtggccttccagttcacggtgaccccagacggggtcgacttccggctcagtcgggaggccctgaaacacgtctacctgtctgggatcaactcctggaagaaacgcctgatccgcatcaagaatggcatcctcaggggcgtgtaccctggcagccccaccagctggctggtcgtcatcatggcaacagtgggttcctccttctgcaacgtggacatctccttggggctggtcagttgcatccagagatgcctccctcaggggtgtggcccctaccagaccccgcagacccgggcacttctcagcatggccatcttctccacgggcgtctgggtgacgggcatcttcttcttccgccaaaccctgaagctgcttctctgctaccatgggtggatgtttgagatgcatggcaagaccagcaacttgaccaggatctgggcttacctagagtctgtgcgccccttgttggatgatgaggaatattaccgcatggagttgctggccaaagaattccaggacaagactgcccccaggctgcagaaatacctggtgctcaagtcatggtgggcaagtaactatgtgagtgactggtgggaagagtacatctaccttcgaggcaggagccctctcatggtgaacagcaactattatgtcatggaccttgtgctcatcaagaatacagacgtgcaggcagcccgcctgggaaacatcatccacgccatgatcatgtatcgccgtaaactggaccgtgaagaaatcaagcctgtgatggcactgggcatagtgcctatgtgctcctaccagatggagaggatgttcaacaccactcggatcccgggcaaggacacagatgtgctacagcacctctcagacagccggcacgtggctgtctaccacaagggacgcttcttcaagctgtggctctatgagggcgcccgtctgctcaagcctcaggatctggagatgcagttccagaggatcctggacgacccctccccacctcagcctggggaggagaagctggcagccctcactgcaggaggaagggtggagtgggcgcaggcacgccaggccttctttagctctggaaagaataaggctgccttggaggccatcgagcgtgccgctttcttcgtggccctggatgaggaatcctactcctatgaccccgaagatgaggccagcctcagcctctatggcaaggccctgctacatggcaactgctacaacaggtggtttgacaaatccttcactctcatttccttcaagaatggccagttgggtctcaatgcagagcatgcgtgggcagatgctcccatcattgggcacctctgggagtttgtcctgggcacagacagcttccacctgggctacacggagaccgggcactgcctgggcaaaccgaaccctgcgctcgcacctcctacacggctgcagtgggacattccaaaacagtgccaggcggtcatcgagagttcctaccaggtggccaaggcgttggcagacgacgtggagttgtactgcttccagttcctgccctttggcaaaggcctcatcaagaagtgccggaccagccctgatgcctttgtgcagatcgcgctgcagctggctcacttccgggacaggggtaagttctgcctgacctatgaggcctcaatgaccagaatgttccgggagggacggactgagactgtgcgttcctgtaccagcgagtccacagcctttgtgcaggccatgatggaggggtcccacacaaaagcagacctgcgagatctcttccagaaggctgctaagaagcaccagaatatgtaccgcctggccatgaccggggcagggatcgacaggcacctcttctgcctttacttggtctccaagtacctaggagtcagctctcctttccttgctgaggtgctctcggaaccctggcgtctctccaccagccagatcccccaatcccagatccgcatgttcgacccagagcagcaccccaatcacctgggcgctggaggtggctttggccctgtagcagatgatggctatggagtttcctacatgattgcaggcgagaacacgatcttcttccacatctccagcaagttctcaagctcagagacgaacgcccagcgctttggaaaccacatccgcaaagccctgctggacattgctgatcttttccaagttcccaaggcctacagctgaagcccttaggtacctgtgttttgtttgggaactcggaggccctccccctcccccagctcagaccacagaggtggcaagagaagggctgaagctggaagactgttcatgagggacttgtgtgacctgctttgaaatgtgtgactctgctgagtgacgtaggctctgagatagctgtccacgcccacgtgtttgcttggaataaatacttgcctcagaaccttca

SEQ ID NO: 20 - DNA, 2625 bp, Homo sapiens
agacctttgagcaaccttcaccgcacagaaacccagccgcgccctgcaattcccaccgcggaaggtgccgaccaacccccaggatggcggaagctcaccaggccgtggccttccagttcacggtgaccccagacggggtcgacttccggctcagtcgggaggccctgaaacacgtctacctgtctgggatcaactcctggaagaaacgcctgatccgcatcaagaatggcatcctcaggggcgtgtaccctggcagccccaccagctggctggtcgtcatcatggcaacagtgggttcctccttctgcaacgtggacatctccttggggctggtcagttgcatccagagatgcctccctcaggggtgtggcccctaccagaccccgcagacccgggcacttctcagcatggccatcttctccacgggcgtctgggtgacgggcatcttcttcttccgccaaaccctgaagctgcttctctgctaccatgggtggatgtttgagatgcatggcaagaccagcaacttgaccaggatctgggctatgtgtatccgccttctatccagccggcaccctatgctctacagcttccagacatctctgcccaagcttcctgtgcccagggtgtcagccacaattcagcggtacctagagtctgtgcgccccttgttggatgatgaggaatattaccgcatggagttgctggccaaagaattccaggacaagactgcccccaggctgcagaaatacctggtgctcaagtcatggtgggcaagtaactatgtgagtgactggtgggaagagtacatctaccttcgaggcaggagccctctcatggtgaacagcaactattatgtcatggaccttgtgctcatcaagaatacagacgtgcaggcagcccgcctgggaaacatcatccacgccatgatcatgtatcgccgtaaactggaccgtgaagaaatcaagcctgtgatggcactgggcatagtgcctatgtgctcctaccagatggagaggatgttcaacaccactcggatcccgggcaaggacacagatgtgctacagcacctctcagacagccggcacgtggctgtctaccacaagggacgcttcttcaagctgtggctctatgagggcgcccgtctgctcaagcctcaggatctggagatgcagttccagaggatcctggacgacccctccccacctcagcctggggaggagaagctggcagccctcactgcaggaggaagggtggagtgggcgcaggcacgccaggccttctttagctctggaaagaataaggctgccttggaggccatcgagcgtgccgctttcttcgtggccctggatgaggaatcctactcctatgaccccgaagatgaggccagcctcagcctctatggcaaggccctgctacatggcaactgctacaacaggtggtttgacaaatccttcactctcatttccttcaagaatggccagttgggtctcaatgcagagcatgcgtgggcagatgctcccatcattgggcacctctgggagtttgtcctgggcacagacagcttccacctgggctacacggagaccgggcactgcctgggcaaaccgaaccctgcgctcgcacctcctacacggctgcagtgggacattccaaaacagtgccaggcggtcatcgagagttcctaccaggtggccaaggcgttggcagacgacgtggagttgtactgcttccagttcctgccctttggcaaaggcctcatcaagaagtgccggaccagccctgatgcctttgtgcagatcgcgctgcagctggctcacttccgggacaggggtaagttctgcctgacctatgaggcctcaatgaccagaatgttccgggagggacggactgagactgtgcgttcctgtaccagcgagtccacagcctttgtgcaggccatgatggaggggtcccacacaaaagcagacctgcgagatctcttccagaaggctgctaagaagcaccagaatatgtaccgcctggccatgaccggggcagggatcgacaggcacctcttctgcctttacttggtctccaagtacctaggagtcagctctcctttccttgctgaggtgctctcggaaccctggcgtctctccaccagccagatcccccaatcccagatccgcatgttcgacccagagcagcaccccaatcacctgggcgctggaggtggctttggccctgtagcagatgatggctatggagtttcctacatgattgcaggcgagaacacgatcttcttccacatctccagcaagttctcaagctcagagacgaacgcccagcgctttggaaaccacatccgcaaagccctgctggacattgctgatcttttccaagttcccaaggcctacagctgaagcccttaggtacctgtgttttgtttgggaactcggaggccctccccctcccccagctcagaccacagaggtggcaagagaagggctgaagctggaagactgttcatgagggacttgtgtgacctgctttgaaatgtgtgactctgctgagtgacgtaggctctgagatagctgtccacgcccacgtgtttgcttggaataaatacttgcctcagaaccttca

SEQ ID NO: 21 - DNA, 2644 bp, Homo sapiens
gcggactggctgggggcgtctcggcgcggctggcggcggggccggcctaagcgcgcccgcgcacccatctgcccccgtcctaggtgccgaccaacccccaggatggcggaagctcaccaggccgtggccttccagttcacggtgaccccagacggggtcgacttccggctcagtcgggaggccctgaaacacgtctacctgtctgggatcaactcctggaagaaacgcctgatccgcatcaagaatggcatcctcaggggcgtgtaccctggcagccccaccagctggctggtcgtcatcatggcaacagtgggttcctccttctgcaacgtggacatctccttggggctggtcagttgcatccagagatgcctccctcaggggtgtggcccctaccagaccccgcagacccgggcacttctcagcatggccatcttctccacgggcgtctgggtgacgggcatcttcttcttccgccaaaccctgaagctgcttctctgctaccatgggtggatgtttgagatgcatggcaagaccagcaacttgaccaggatctgggctatgtgtatccgccttctatccagccggcaccctatgctctacagcttccagacatctctgcccaagcttcctgtgcccagggtgtcagccacaattcagcggtacctagagtctgtgcgccccttgttggatgatgaggaatattaccgcatggagttgctggccaaagaattccaggacaagactgcccccaggctgcagaaatacctggtgctcaagtcatggtgggcaagtaactatgtgagtgactggtgggaagagtacatctaccttcgaggcaggagccctctcatggtgaacagcaactattatgtcatggaccttgtgctcatcaagaatacagacgtgcaggcagcccgcctgggaaacatcatccacgccatgatcatgtatcgccgtaaactggaccgtgaagaaatcaagcctgtgatggcactgggcatagtgcctatgtgctcctaccagatggagaggatgttcaacaccactcggatcccgggcaaggacacagatgtgctacagcacctctcagacagccggcacgtggctgtctaccacaagggacgcttcttcaagctgtggctctatgagggcgcccgtctgctcaagcctcaggatctggagatgcagttccagaggatcctggacgacccctccccacctcagcctggggaggagaagctggcagccctcactgcaggaggaagggtggagtgggcgcaggcacgccaggccttctttagctctggaaagaataaggctgccttggaggccatcgagcgtgccgctttcttcgtggccctggatgaggaatcctactcctatgaccccgaagatgaggccagcctcagcctctatggcaaggccctgctacatggcaactgctacaacaggtggtttgacaaatccttcactctcatttccttcaagaatggccagttgggtctcaatgcagagcatgcgtgggcagatgctcccatcattgggcacctctgggagtttgtcctgggcacagacagcttccacctgggctacacggagaccgggcactgcctgggcaaaccgaaccctgcgctcgcacctcctacacggctgcagtgggacattccaaaacagtgccaggcggtcatcgagagttcctaccaggtggccaaggcgttggcagacgacgtggagttgtactgcttccagttcctgccctttggcaaaggcctcatcaagaagtgccggaccagccctgatgcctttgtgcagatcgcgctgcagctggctcacttccgggacaggggtaagttctgcctgacctatgaggcctcaatgaccagaatgttccgggagggacggactgagactgtgcgttcctgtaccagcgagtccacagcctttgtgcaggccatgatggaggggtcccacacaaaagcagacctgcgagatctcttccagaaggctgctaagaagcaccagaatatgtaccgcctggccatgaccggggcagggatcgacaggcacctcttctgcctttacttggtctccaagtacctaggagtcagctctcctttccttgctgaggtgctctcggaaccctggcgtctctccaccagccagatcccccaatcccagatccgcatgttcgacccagagcagcaccccaatcacctgggcgctggaggtggctttggccctgtagcagatgatggctatggagtttcctacatgattgcaggcgagaacacgatcttcttccacatctccagcaagttctcaagctcagagacgaacgcccagcgctttggaaaccacatccgcaaagccctgctggacattgctgatcttttccaagttcccaaggcctacagctgaagcccttaggtacctgtgttttgtttgggaactcggaggccctccccctcccccagctcagaccacagaggtggcaagagaagggctgaagctggaagactgttcatgagggacttgtgtgacctgctttgaaatgtgtgactctgctgagtgacgtaggctctgagatagctgtccacgcccacgtgtttgcttggaataaatacttgcctcagaaccttca

SEQ ID NO: 22 - DNA, 2857 bp, Homo sapiens
agagtggctggccccacgcacggacaggagtgaacccgagctgtgccgaccaacccccaggatggcggaagctcaccaggccgtggccttccagttcacggtgaccccagacggggtcgacttccggctcagtcgggaggccctgaaacacgtctacctgtctgggatcaactcctggaagaaacgcctgatccgcatcaagaatggcatcctcaggggcgtgtaccctggcagccccaccagctggctggtcgtcatcatggcaacagtgggttcctccttctgcaacgtggacatctccttggggctggtcagttgcatccagagatgcctccctcaggggtgtggcccctaccagaccccgcagacccgggcacttctcagcatggccatcttctccacgggcgtctgggtgacgggcatcttcttcttccgccaaaccctgaagctgcttctctgctaccatgggtggatgtttgagatgcatggcaagaccagcaacttgaccaggatctgggctatgtgtatccgccttctatccagccggcaccctatgctctacagcttccagacatctctgcccaagcttcctgtgcccagggtgtcagccacaattcagcggtacctagagtctgtgcgccccttgttggatgatgaggaatattaccgcatggagttgctggccaaagaattccaggacaagactgcccccaggctgcagaaatacctggtgctcaagtcatggtgggcaagtaactatgtgagtgactggtgggaagagtacatctaccttcgaggcaggagccctctcatggtgaacagcaactattatgtcatggaccttgtgctcatcaagaatacagacgtgcaggcagcccgcctgggaaacatcatccacgccatgatcatgtatcgccgtaaactggaccgtgaagaaatcaagcctgtgatggcactgggcatagtgcctatgtgctcctaccagatggagaggatgttcaacaccactcggatcccgggcaaggacacagatgtgctacagcacctctcagacagccggcacgtggctgtctaccacaagggacgcttcttcaagctgtggctctatgagggcgcccgtctgctcaagcctcaggatctggagatgcagttccagaggatcctggacgacccctccccacctcagcctggggaggagaagctggcagccctcactgcaggaggaagggtggagtgggcgcaggcacgccaggccttctttagctctggaaagaataaggctgccttggaggccatcgagcgtgccgctttcttcgtggccctggatgaggaatcctactcctatgaccccgaagatgaggccagcctcagcctctatggcaaggccctgctacatggcaactgctacaacaggtggtttgacaaatccttcactctcatttccttcaagaatggccagttgggtctcaatgcagagcatgcgtgggcagatgctcccatcattgggcacctctgggagtttgtcctgggcacagacagcttccacctgggctacacggagaccgggcactgcctgggcaaaccgaaccctgcgctcgcacctcctacacggctgcagtgggacattccaaaacagtgccaggcggtcatcgagagttcctaccaggtggccaaggcgttggcagacgacgtggagttgtactgcttccagttcctgccctttggcaaaggcctcatcaagaagtgccggaccagccctgatgcctttgtgcagatcgcgctgcagctggctcacttccgggacaggggtaagttctgcctgacctatgaggcctcaatgaccagaatgttccgggagggacggactgagactgtgcgttcctgtaccagcgagtccacagcctttgtgcaggccatgatggaggggtcccacacaaaagcagacctgcgagatctcttccagaaggctgctaagaagcaccagaatatgtaccgcctggccatgaccggggcagggatcgacaggcacctcttctgcctttacttggtctccaagtacctaggagtcagctctcctttccttgctgaggtgctctcggaaccctggcgtctctccaccagccagatcccccaatcccagatccgcatgttcgacccagagcagcaccccaatcacctgggcgctggaggtggctttggccctgtagcagatgatggctatggagtttcctacatgattgcaggcgagaacacgatcttcttccacatctccagcaagttctcaagctcagagacgaacgcccagcgctttggaaaccacatccgcaaagccctgctggacattgctgatcttttccaagttcccaaggcctacagctgaaggttggagaaatgccagctgccctttcgtccccacactgtggaggaagggacctgtggcagctcacaggcatgaggggtggccgtgcacaggtgcccaggctccaaggacagctccggcagcaggtcctcgctgggcagatgctgctccctgagggcccaggtggtggaggtggggttggagcaggaagggaattttgatttttttttttcttgatagatactaataaaaataaggctgtgtaattttctctcagcccttaggtacctgtgttttgtttgggaactcggaggccctccccctcccccagctcagaccacagaggtggcaagagaagggctgaagctggaagactgttcatgagggacttgtgtgacctgctttgaaatgtgtgactctgctgagtgacgtaggctctgagatagctgtccacgcccacgtgtttgcttggaataaatacttgcctcagaaccttca

SEQ ID NO: 23 - DNA, 2879 bp, Homo sapiens
agacctttgagcaaccttcaccgcacagaaacccagccgcgccctgcaattcccaccgcggaaggtgccgaccaacccccaggatggcggaagctcaccaggccgtggccttccagttcacggtgaccccagacggggtcgacttccggctcagtcgggaggccctgaaacacgtctacctgtctgggatcaactcctggaagaaacgcctgatccgcatcaagaatggcatcctcaggggcgtgtaccctggcagccccaccagctggctggtcgtcatcatggcaacagtgggttcctccttctgcaacgtggacatctccttggggctggtcagttgcatccagagatgcctccctcaggggtgtggcccctaccagaccccgcagacccgggcacttctcagcatggccatcttctccacgggcgtctgggtgacgggcatcttcttcttccgccaaaccctgaagctgcttctctgctaccatgggtggatgtttgagatgcatggcaagaccagcaacttgaccaggatctgggctatgtgtatccgccttctatccagccggcaccctatgctctacagcttccagacatctctgcccaagcttcctgtgcccagggtgtcagccacaattcagcggtacctagagtctgtgcgccccttgttggatgatgaggaatattaccgcatggagttgctggccaaagaattccaggacaagactgcccccaggctgcagaaatacctggtgctcaagtcatggtgggcaagtaactatgtgagtgactggtgggaagagtacatctaccttcgaggcaggagccctctcatggtgaacagcaactattatgtcatggaccttgtgctcatcaagaatacagacgtgcaggcagcccgcctgggaaacatcatccacgccatgatcatgtatcgccgtaaactggaccgtgaagaaatcaagcctgtgatggcactgggcatagtgcctatgtgctcctaccagatggagaggatgttcaacaccactcggatcccgggcaaggacacagatgtgctacagcacctctcagacagccggcacgtggctgtctaccacaagggacgcttcttcaagctgtggctctatgagggcgcccgtctgctcaagcctcaggatctggagatgcagttccagaggatcctggacgacccctccccacctcagcctggggaggagaagctggcagccctcactgcaggaggaagggtggagtgggcgcaggcacgccaggccttctttagctctggaaagaataaggctgccttggaggccatcgagcgtgccgctttcttcgtggccctggatgaggaatcctactcctatgaccccgaagatgaggccagcctcagcctctatggcaaggccctgctacatggcaactgctacaacaggtggtttgacaaatccttcactctcatttccttcaagaatggccagttgggtctcaatgcagagcatgcgtgggcagatgctcccatcattgggcacctctgggagtttgtcctgggcacagacagcttccacctgggctacacggagaccgggcactgcctgggcaaaccgaaccctgcgctcgcacctcctacacggctgcagtgggacattccaaaacagtgccaggcggtcatcgagagttcctaccaggtggccaaggcgttggcagacgacgtggagttgtactgcttccagttcctgccctttggcaaaggcctcatcaagaagtgccggaccagccctgatgcctttgtgcagatcgcgctgcagctggctcacttccgggacaggggtaagttctgcctgacctatgaggcctcaatgaccagaatgttccgggagggacggactgagactgtgcgttcctgtaccagcgagtccacagcctttgtgcaggccatgatggaggggtcccacacaaaagcagacctgcgagatctcttccagaaggctgctaagaagcaccagaatatgtaccgcctggccatgaccggggcagggatcgacaggcacctcttctgcctttacttggtctccaagtacctaggagtcagctctcctttccttgctgaggtgctctcggaaccctggcgtctctccaccagccagatcccccaatcccagatccgcatgttcgacccagagcagcaccccaatcacctgggcgctggaggtggctttggccctgtagcagatgatggctatggagtttcctacatgattgcaggcgagaacacgatcttcttccacatctccagcaagttctcaagctcagagacgaacgcccagcgctttggaaaccacatccgcaaagccctgctggacattgctgatcttttccaagttcccaaggcctacagctgaaggttggagaaatgccagctgccctttcgtccccacactgtggaggaagggacctgtggcagctcacaggcatgaggggtggccgtgcacaggtgcccaggctccaaggacagctccggcagcaggtcctcgctgggcagatgctgctccctgagggcccaggtggtggaggtggggttggagcaggaagggaattttgatttttttttttcttgatagatactaataaaaataaggctgtgtaattttctctcagcccttaggtacctgtgttttgtttgggaactcggaggccctccccctcccccagctcagaccacagaggtggcaagagaagggctgaagctggaagactgttcatgagggacttgtgtgacctgctttgaaatgtgtgactctgctgagtgacgtaggctctgagatagctgtccacgcccacgtgtttgcttggaataaatacttgcctcagaaccttca

SEQ ID NO: 24 - DNA, 2603 bp, Homo sapiens
agagtggctggccccacgcacggacaggagtgaacccgagctgtgccgaccaacccccaggatggcggaagctcaccaggccgtggccttccagttcacggtgaccccagacggggtcgacttccggctcagtcgggaggccctgaaacacgtctacctgtctgggatcaactcctggaagaaacgcctgatccgcatcaagaatggcatcctcaggggcgtgtaccctggcagccccaccagctggctggtcgtcatcatggcaacagtgggttcctccttctgcaacgtggacatctccttggggctggtcagttgcatccagagatgcctccctcaggggtgtggcccctaccagaccccgcagacccgggcacttctcagcatggccatcttctccacgggcgtctgggtgacgggcatcttcttcttccgccaaaccctgaagctgcttctctgctaccatgggtggatgtttgagatgcatggcaagaccagcaacttgaccaggatctgggctatgtgtatccgccttctatccagccggcaccctatgctctacagcttccagacatctctgcccaagcttcctgtgcccagggtgtcagccacaattcagcggtacctagagtctgtgcgccccttgttggatgatgaggaatattaccgcatggagttgctggccaaagaattccaggacaagactgcccccaggctgcagaaatacctggtgctcaagtcatggtgggcaagtaactatgtgagtgactggtgggaagagtacatctaccttcgaggcaggagccctctcatggtgaacagcaactattatgtcatggaccttgtgctcatcaagaatacagacgtgcaggcagcccgcctgggaaacatcatccacgccatgatcatgtatcgccgtaaactggaccgtgaagaaatcaagcctgtgatggcactgggcatagtgcctatgtgctcctaccagatggagaggatgttcaacaccactcggatcccgggcaaggacacagatgtgctacagcacctctcagacagccggcacgtggctgtctaccacaagggacgcttcttcaagctgtggctctatgagggcgcccgtctgctcaagcctcaggatctggagatgcagttccagaggatcctggacgacccctccccacctcagcctggggaggagaagctggcagccctcactgcaggaggaagggtggagtgggcgcaggcacgccaggccttctttagctctggaaagaataaggctgccttggaggccatcgagcgtgccgctttcttcgtggccctggatgaggaatcctactcctatgaccccgaagatgaggccagcctcagcctctatggcaaggccctgctacatggcaactgctacaacaggtggtttgacaaatccttcactctcatttccttcaagaatggccagttgggtctcaatgcagagcatgcgtgggcagatgctcccatcattgggcacctctgggagtttgtcctgggcacagacagcttccacctgggctacacggagaccgggcactgcctgggcaaaccgaaccctgcgctcgcacctcctacacggctgcagtgggacattccaaaacagtgccaggcggtcatcgagagttcctaccaggtggccaaggcgttggcagacgacgtggagttgtactgcttccagttcctgccctttggcaaaggcctcatcaagaagtgccggaccagccctgatgcctttgtgcagatcgcgctgcagctggctcacttccgggacaggggtaagttctgcctgacctatgaggcctcaatgaccagaatgttccgggagggacggactgagactgtgcgttcctgtaccagcgagtccacagcctttgtgcaggccatgatggaggggtcccacacaaaagcagacctgcgagatctcttccagaaggctgctaagaagcaccagaatatgtaccgcctggccatgaccggggcagggatcgacaggcacctcttctgcctttacttggtctccaagtacctaggagtcagctctcctttccttgctgaggtgctctcggaaccctggcgtctctccaccagccagatcccccaatcccagatccgcatgttcgacccagagcagcaccccaatcacctgggcgctggaggtggctttggccctgtagcagatgatggctatggagtttcctacatgattgcaggcgagaacacgatcttcttccacatctccagcaagttctcaagctcagagacgaacgcccagcgctttggaaaccacatccgcaaagccctgctggacattgctgatcttttccaagttcccaaggcctacagctgaagcccttaggtacctgtgttttgtttgggaactcggaggccctccccctcccccagctcagaccacagaggtggcaagagaagggctgaagctggaagactgttcatgagggacttgtgtgacctgctttgaaatgtgtgactctgctgagtgacgtaggctctgagatagctgtccacgcccacgtgtttgcttggaataaatacttgcctcagaaccttca

SEQ ID NO: 25 - DNA, 236 bp, Unknown
  Description of Unknown: Aardvark H1 Bidirectional Promoter sequence
ggaacgaaactaacttggccaaactatataagaatgccatagctttcaacatttaatggttagggtgccttctcataatacacagcgacatgcaaatatcatggcccttccaggaggcgtgcctccccgtcccgcgtgtgcgtcttgcttgtgcgcaggcgcgctgctcttccggctgtaagactttgagcccttgatttctgtgagcgggttcgtgaagtcagtgttctggctcc

SEQ ID NO: 26 - DNA, 231 bp, Unknown
  Description of Unknown: Angolan colobus H1 Bidirectional Promoter sequence
ggggaagggtggtcctccatagaacttataagactcccatactcaaagacatttcacgtttatggtgacttcccagaagacatagcgacatgcaaatattgcagggcgtcacaccccctgtcccttacagctctcttcctgccagggcgcacgcgcgctgggtgttcccgcgtagtgacactgggcccgcgattccttggaacgggttgatgacgtcagcgttcgaattac

SEQ ID NO: 27 - DNA, 230 bp, Unknown
  Description of Unknown: Big brown bat H1 Bidirectional Promoter sequence
gggaagcgagcgtcacacggcggatatataaggcccccttacctgaaggccttttacggttagggtgacttcccacaacacttagcgacatgcaaatttagacgggcgtgcctccccgtccctgggcaacttctctcctggacacgcgcgctcgcgctgagtgttcccgccttttgactccagccgagcgaatcctgggagagggcagatgacgtcaacagtcaggctcc

SEQ ID NO: 28 - DNA, 233 bp, Unknown
  Description of Unknown: Black flying-fox H1 Bidirectional Promoter sequence
gagagaaaaagcctgcacgcagaatatataaggatcccatatctgaagacattttacggttacggtgatttcccacaacacatagcgacatgtaaatatagtggggcatgcctctcctgtccctgggcagcttctcgccagaacgcacgcgcggtgcgtgttcccgccttgtgactaagttggcgagtcagggaggagattgatgatgtcatcatcgtcagctcacccgctcc

SEQ ID NO: 29 - DNA, 230 bp, Unknown
  Description of Unknown: Black snub-nosed monkey H1 Bidirectional Promoter sequence
ggggaagggtggtcctacacagagcttataagactcccatactcaaagacatttctcgtttatggtgacttcccagaagccatagcgacatgcaaatattgcagggcgtcacacccctgtcccttacagccatcttcctgccagggcgcacgcgcgctgggtgttcccgcgtagtgacactgggcccgcgattccttggagcgggttgatgacgtcagcgttcgacttcc

SEQ ID NO: 30 - DNA, 230 bp, Unknown
  Description of Unknown: Bonobo H1 Bidirectional Promoter sequence
gggaaagggtggtgccacacagaacttataagactcccatatccaaagacatttcacgtttatggtgatttcccagaacacatagcgacatgcaaatattgcagggcgccactcccctgtccctcacagccatcttcctgccagggcgcacgcgcgctgggtgttcccgcctagtgacactgggcccgcgattccttggagcgggttgatgacgtcagcgttcgaattcc

SEQ ID NO: 31 - DNA, 212 bp, Unknown
  Description of Unknown: Brush-tailed rat H1 Bidirectional Promoter sequence
gaaggaagttagtcacaaacgcaaattataagaggtccaaagctcagtgtactctatggttagggtgacttcccacaatacatagcgatatgcagatttcttccccagtctggcccgctgggccctccctagagcgcatgcgctgcaagtccacggcggagcaccgggcgggcgatcccggagcgggttgatgacgtcagcgtttgaactcc

SEQ ID NO: 32 - DNA, 233 bp, Unknown
  Description of Unknown: Camel H1 Bidirectional Promoter sequence
gagaaagggtgggctcacgccacctttataaggctcccaaacttaaagacatttctcggttatggcgacttcccacaacacatagcgacatgcaaatactgcagacctgtggcgccgacccggtcctgtgcagccatctttaaggctgggacgcacgcgcgctgcgtgttcccgccctgtgactgcgccggcgattactgggagaggattgatgacgtcaacgttcgggttcc

SEQ ID NO: 33 - DNA, 241 bp, Unknown
  Description of Unknown: Cape golden mole H1 Bidirectional Promoter sequence
gggctaacactgtgttggtattagcttataagaaacccaaatataaagtcatttaacgcttagtgtgacttcccatcatacaaagcgacatgcaaatatcatgggccttccgggaggcgtgccttcccgtcctgcgtactggagttctctctggggcgcacgcgcgctatgtgtttcccgccttgtgacttagggcgggcgattcctgagatccgaatggtgacgtcaactttcaggctcg

SEQ ID NO: 34 - DNA, 221 bp, Unknown
  Description of Unknown: Chinchilla H1 Bidirectional Promoter sequence
gaaagccgaaggtttggagcgaaacttataagaagcccaaatctcactatatttttaggtcatggcgacttcccacaagccacagcgatatgtagatataggagcccctcccagttctggtccttccgcgtctcactaaagcgcatgcgctgcaggttcgcggcctgcgactgggcctgcaattcctgggagcgagttgatgacgtcagcgtttgaactcc

SEQ ID NO: 35 - DNA, 179 bp, Unknown
  Description of Unknown: Chinese hamster H1 Bidirectional Promoter sequence
acagcctggtgaatggcgggctttataaggctccggagagaaagcgctttctcagttatggtggtttcccacaaggcacagcgcacactttatttgcatgcgatctagcgcaggctcccgctccagacaagaagcccgcgcttttcggctgcttatgatgacgtcgggcctcaagcgcc

SEQ ID NO: 36 - DNA, 204 bp, Unknown
  Description of Unknown: Chinese tree shrew H1 Bidirectional Promoter sequence
gggggaagctgggtccactgagttcttataaggtttccagtcctagagcgattttaccattacggtgatttcccagcatccgtagctacatgcaaatagcgcggggcgcgtctctcaggtccctcccccgtgccctctcactgtacgtacccgcgtcctagggacgccgcgcccggggttcccggacgtcagcgttccgacgca

SEQ ID NO: 37 - DNA, 227 bp, Artificial Sequence
  Description of Artificial Sequence: Synthetic polynucleotide
ggggaagggtggtcccacacagaacttataaggctcccatacctaaagacatttcacggttatggtgacttcccacaagacatagcgacatgcaaatattgcagggcgtccctcccctgtccctaggcatcttctcgccagggcgcacgcgcgctgcgtgttcccgccttgtgacactgggcccgcgattcctgggagcgggttgatgacgtcagcgttcgagctcc

SEQ ID NO: 38 - DNA, 229 bp, Unknown
  Description of Unknown: David's myotis H1 Bidirectional Promoter sequence
gagaggggctgtgcacacggcggatatataaggcccccttatgaataaccctttataagttatggtgatttcccacaacgcatagcgacatgcaaattcgatgggcgtgcctcctctgtccccaggcaacttctctcctggacgcgcgctcctcgctgcgtgttcccgccttttgactccagccgagcgaatcctgggagagggcaggtgacgtcaacagtcaggctcg

SEQ ID NO: 39 - DNA, 230 bp, Unknown
  Description of Unknown: Drill H1 Bidirectional Promoter sequence
ggggaaaggtggtcccacacagaacttataagattcccatactcaaagacatttctcgtttatggtgacttcccagaagacacagcgacatgcaaatattgtagggcgtcacacccctgtccctcacagtcatcttcctgccagggcgcacgcgcgctggatgttcccgcgtagtgaccctgggcccgcgattccttggagcgggttgatgacgtcagcgttcgaattcc

SEQ ID NO: 40 - DNA, 230 bp, Unknown
  Description of Unknown: Gibbon H1 Bidirectional Promoter sequence
ggggaaaagtagttttttttagaccttataagattcccaaacccaaagacatttctcgtttatggtgacttcccagaagacatagcgacatgcaaatattgcagggcgccactcccctgtccctcacagccatcttcctgccagggcgcacgcgcgctgggtgttcccgcctagtgacactcggcccgcgattccttggagcgggttgatgacgtcagcgttcgaattcc

SEQ ID NO: 41 - DNA, 217 bp, Unknown
  Description of Unknown: Goat H1 Bidirectional Promoter sequence
ggcaaacaacgcgcgcaaacagcatttataatgagctcatacctaaagccactttacgattacggtgacttcccacaagacattgcggcatgcaaatattttagtgcgtcccgcccctggtagttccacgctaggacgcacacgcactacggttcccgcctttagactgcgctggcgattccagcgagcggactgatgacgtcagcgttggggctcc

SEQ ID NO: 42 - DNA, 187 bp, Unknown
  Description of Unknown: Golden hamster H1 Bidirectional Promoter sequence
gtggcccggcggcgggcgaactatataagcctccgcggaggaagcgctttctcggttagggtggtttcccacaagcctcagcgcacagcctctttgcatacgctcccgccgcccccgggctcctccctctccgcacaagaagcccgcgcatttcgactgcggatgatgacgtcgggcctcgagcgcc

SEQ ID NO: 43 - DNA, 230 bp, Unknown
  Description of Unknown: Golden snub-nosed monkey H1 Bidirectional Promoter sequence
ggggaagggtggtcctacacagagcttataagactcccatactcaaagacatttctcgtttatggtgacttcccagaagccatagcgacatgcaaatattgcagggcgtcacacccctgtcccttacagccatcttcctgccagggcgcacgcgcgctgggtgttcccgcgtagtgacactgggcccgcgattccttggagcgggttgatgacgtcagcgttcgaattcc

SEQ ID NO: 44 - DNA, 210 bp, Unknown
  Description of Unknown: Hedgehog H1 Bidirectional Promoter sequence
gcctaaaccggctctttcaacagacttataaggacctcttatcttaggacatttttttcttagggtaacttcccatgatgcacagcgatatgtaaatatggcgccgcgagtctctcctaggcgtctccccaggacgcaggcgcactgcttgttcccgcgttaacattgctgattctgggagactgctgatgacgtcagcgtccagtctac

SEQ ID NO: 45 - DNA, 218 bp, Unknown
  Description of Unknown: Killer whale H1 Bidirectional Promoter sequence
gccgaaaaccaggctcaagccacatttataaggctcccaaacctaaatacatttgtcggttatggtgacttcccgcaacacattgcgacatgcaaatactgcggagcgttcctcccctagcaactcctcgctgggacgcacgcgcgctacgtgctcccgccttttgaccgagccggcgatacttgggagagggttgatgacgtcagcgttctggctcc

SEQ ID NO: 46 - DNA, 180 bp, Unknown
  Description of Unknown: Lesser Egyptian jerboa H1 Bidirectional Promoter sequence
gggcagaccttaaccaagcggaggtttataaagcgcccacattcagtgacacttctcagtcacggtgacttcccacaaaacacagcgcatgcaaatattatggcgggagggggggtgctcgcctgggcgcacgcgcgctgtgggttcccgcgagcgggatgatgacgtcactaagtgagc

SEQ ID NO: 47 - DNA, 236 bp, Unknown
  Description of Unknown: Manatee H1 Bidirectional Promoter sequence
gagccaaacagctgttggtcacattatataagaatcccatatataaagacatttttggcgtagggtgacttcccacaatacatagcgacatgcaaataccatggtcctccaggaggcgtgcctccccgtccccttggtccggttcttgctggggcgcacgcgcgctgcgtgttcccggtctgtgactcagctcgcgattccggagagcggattggtgaagtcaatgttctgggtcc

SEQ ID NO: 48 - DNA, 227 bp, Unknown
  Description of Unknown: Mas night monkey H1 Bidirectional Promoter sequence
ggggaagggtggtcctatacagaacttataagactcccatacccaaagacatttcacggttatggtgacttcccagaagacacagcgacatgcaaatattgtaggtcgtgcctcgcttgtccctcagtagtcttcctttcagagcgcacgcgcgctgggtgtcccgccaactgacactgggctcgcgattccttggagcgggttgatgacgtcagcgttcgaattcc

SEQ ID NO: 49 - DNA, 228 bp, Unknown
  Description of Unknown: Microbat H1 Bidirectional Promoter sequence
ggagaaggaggcgtagacggcggatatataaggcccccttatgtgtagtccttttacggttagggtgacttcccacaacgcatagcgacatgcaaatttgacgggcgtgcctcctctgtccccgggcaacttctctcctggacgcgcgctcgcgctgcgtgttcccgccttttgactccagccgagcgaatcctgggagagggcaggtgacgtcaacagtcaggctcg

SEQ ID NO: 50 - DNA, 236 bp, Unknown
  Description of Unknown: Opossum H1 Bidirectional Promoter sequence
ggtgcggggcctcaaagagagcgatatataacgctcacaaaacccgtgctatttcttacagagggtgatatccccatgatccccggcggtatgcaaatagtagtcgcgtcagagcagagcgcagtcagccgctctctcctagcgcgggaaatctatttcttcttcagtctcggtaacgagcgcatgcgcatactgtaggtgacctacggttttgtcaggaatcggttgggagcacc

SEQ ID NO: 51 - DNA, 226 bp, Unknown
  Description of Unknown: Pacific walrus H1 Bidirectional Promoter sequence
gggaaacggtggccccaaagagcatttataaagctccctcaactaaatgcatttatcagttatggtgacttcccacaatacatcgcaacatgcaaacatcgcggggagtacctcccctgtccctacgtgtcttctcaggacgcacgcacgcgcgctgtgttcccgccctgtgactctaggcgggcaattcctagaagacgcttgctgacgggaacgttccggctcc

SEQ ID NO: 52 - DNA, 230 bp, Unknown
  Description of Unknown: Pig-tailed macaque H1 Bidirectional Promoter sequence
ggggaaagccgatcccagccagaacttataagattcccatactcaaagacatttctcgtttatggtgacttcccagaagacacagcgacatgcaaatattgtagggcgtcacacccctgtccctcacagtcatcttcctgccagggcgcacgcgcgctgggtgttcccgcgtagtgacactgggcccgcgattccttggagcgggttgatgacgtcagcgttcgaattcc

SEQ ID NO: 53 - DNA, 175 bp, Unknown
  Description of Unknown: Prairie vole H1 Bidirectional Promoter sequence
gggaaggcggggcggcggcactaaaaggctccggagcggcccagactttacagttatggtggcttcccacgaggcgcagcgccactcatttgcatggacccgccccagacgggaagcccgcaccgctcatttgtgtggccccgccccagacgggaagcccgcgccactcatttgc

SEQ ID NO: 54 - DNA, 230 bp, Unknown
  Description of Unknown: Rhesus H1 Bidirectional Promoter sequence
ggggaagggtggtcccacacagaacttataagattcccatactcaaagacctttctcgtttatggtgacttcccagaagacacagcgacatgcaaatattgtagggcgtcacacccctgtccctcacagtcatcttcctgccagggcgcacgcgcgctgggtgttcccgcgtagtgacactgggcccgcgattccttggagcgggttgatgacgtcagcgttcgaattcc

SEQ ID NO: 55 - DNA, 176 bp, Unknown
  Description of Unknown: Ryukyu mouse H1 Bidirectional Promoter sequence
tggagggtggagaccggccgccactataaggctcgaaagaggaataaattttacgtttagggtgatttcccacaaagcacagcgcgtaatttgcatgtgctctatcccaggctccagtgccagacaagaagcccgcgcatccgggcaagggatgatgacgtcgtccttcaagagcg

SEQ ID NO: 56 - DNA, 182 bp, Unknown
  Description of Unknown: Shrew H1 Bidirectional Promoter sequence
gcgtaagacgcgccgcatcgcgtacttataaggatcccctggtcaacgatcttttacagttagggtgacttcccacagtacacggcggtattcaaatatgaagggcgtgtctagtccgggtcctggctaggcgcatgtgcagtgctggttcccgccacttccgacgtctacgtttagactcc

SEQ ID NO: 57 - DNA, 183 bp, Unknown
  Description of Unknown: Shrew mouse H1 Bidirectional Promoter sequence
tgaaggctgtagaccggccgccactataaggctcgaaagaggaataagtttttcgcttacggtgacttcccacaaagcacagcgcgtaatttgcatgtactctatcccaggcttcctgttccagactagaagcccgcgcatccgggcaagggacgatgacatcatccccatccctccagcgcg

SEQ ID NO: 58 - DNA, 230 bp, Unknown
  Description of Unknown: Sifaka H1 Bidirectional Promoter sequence
gagggaaaagggttctgcacagaatttataaggctcccaaatctaaaaacatttcaccattatggtgatttcccacaacacatagcgacatgcaaatatctcagagcgtacctcccctgtcctatacgggcgtcaactcgccatggcgcacgcgcgttgtgtgtttcccgcctgtgactctgggcccgcgattcctcccagcgggttgagtacgtcagctccggtgcttc

SEQ ID NO: 59 - DNA, 230 bp, Unknown
  Description of Unknown: Sooty mangabey H1 Bidirectional Promoter sequence
ggggaaaggtggtcccacaccgaacttataagactcccatactcaaagacatttctcgtttatggtgacttcccagaagacacagcgacatgcaaatattgtagggcgtcacacccctgtccctcacagtcatcttcctgccagggcgcacgcgcgctgggtgttcccgcgtagtgacactgggcccgcgattccttgcagcgggttggtgacgtcagcgttcgaattcc

SEQ ID NO: 60 - DNA, 229 bp, Unknown
  Description of Unknown: Squirrel monkey H1 Bidirectional Promoter sequence
ggggaagggtggtccttcgcagaacttataagattcccagtcccgaggacatttctagattatggtgacttcccagaatacacagcgacatgcaaatattgcaggtcgtgcctcgcctgtccctcactgtcgtcttcctgccagggcgcacgcgcgctgggtgtcccgccaactgacactgggctcgcgattccttggagcgggttgatgacgtcagcgttcgaattcc

SEQ ID NO: 61 - DNA, 240 bp, Unknown
  Description of Unknown: Star-nosed mole H1 Bidirectional Promoter sequence
gcgcagagacaagcttagctagaatttataaggcgcccatacttgcagacatatatcggttagggtgacttcccacaagccatagcgacatgcaaatagagagggcgggcttcccctgagcttaggcgtcttcttacgaagtcgcgagcgcgtcgcgcgcctgttcccgcccggtcactattggcctgtcactattgtcattccgcccttcccgggcggagtctggtgactttcggttcc

SEQ ID NO: 62 - DNA, 167 bp, Artificial Sequence
  Description of Artificial Sequence: Synthetic polynucleotide
gcagcgcagccctctcgccgcttataaagtgccgcccgcacggcccttctcgctcacggcgacttcccataaagcacagcgcgtaatttgcatgcgctctaccccaggctcctgtgctagacaagaagcccgcgcatccgggcaagggatgatgacgtcagatctcc

SEQ ID NO: 63 - DNA, 152 bp, Artificial Sequence
  Description of Artificial Sequence: Synthetic polynucleotide
ggggaaaagtagtgccgcttataaagtgccgcccgcacggcccttctcgctcacggcgacttcccataaagcacagcgcgtaatttgcatgcgctctaccccaggctcctgtgctagacaagaagcccgcgcatcccggacgtcagatctcc

SEQ ID NO: 64 - DNA, 234 bp, Unknown
  Description of Unknown: Tenrec H1 Bidirectional Promoter sequence
aggttaaagccgcgtcgccgcgcgcttataagaatccgggaactaactacatttcaaggtcagggtgattacccaccctgcatagcgacatgcaaatagcacggaacgtccaggagacgtgcctctaggtcttggggagggaggagttcggcccagcgcgcacgcgcactacgtgttcccgcccgctgtctcggggcgggagatcccgggtaggtgacgtcagtcctcggcttc

SEQ ID NO: 65 - DNA, 217 bp, Unknown
  Description of Unknown: Tibetan antelope H1 Bidirectional Promoter sequence
ggcaaacgactcccgcaaacagcatttataatgcgctcatacataaagccacttttcggttacggtgacttcccacaagacattgcgacatgcaaatattttagtgcatcccgcccctggtagctccacgctaggacgcacacgcactacggttcccgcctttagactgccggggcgattccagggagcggactgatgacgtcagcgttcggactcc

SEQ ID NO: 66 - DNA, 204 bp, Unknown
  Description of Unknown: Tree Shrew H1 Bidirectional Promoter sequence
gggggaagctgggtccactgagttcttataaggtttccagtcctagagcgattttaccattgcggtgatttcccagcatccgtagctacatgcaaatagcgcggggcgcgtctctcaggtccctcccccgtgccctctcactgtacgtacccgcgtcctagggacgccgcgcccggggttcccggacgtcagcgttccgacgca

SEQ ID NO: 67 - DNA, 226 bp, Unknown
  Description of Unknown: Weddell seal H1 Bidirectional Promoter sequence
ggggaagagtggccccagagagcatttataaggctcccgcacctaaatgcatttatcagttatggtgacttcccacaatacatagcaacatgcaaatatagcggggagtacctcccctgtccctacgtgtcttctcaggacgcacgcacgcgggctgtgttcccgccctgtgactctaagcgggcaattcctggaagaggcttgctgacggggacgttcaggctcc

SEQ ID NO: 68 - DNA, 227 bp, Unknown
  Description of Unknown: White rhinoceros H1 Bidirectional Promoter sequence
ggagcaaacatgcgccaggcagcctttataagactcacatatctaaagacatttcacagttagggtgacttcccacaggacacagcgatatgcaaatatcgtggagcgtacctccccagtctccgggcatcttctcgcctacacgcacgcgcgccgcgtgttcccgccctgtgacgctaggtgggcctttcatgggagagggttgatgacgtcaacattcggactcc

SEQ ID NO: 69 - DNA, 229 bp, Unknown
  Description of Unknown: White-faced sapajou H1 Bidirectional Promoter sequence
ggggaaggggtggcctacgcagaacttataagattcccacacctaaagacatttaacgattatggtgacttcccagaatacacagcgacatgcaaatattgcaggtcgtacctcgcctgtcccccacagtcgtcttcctgccagggcgcacgcgcgctgggtgtcccgccaactgacagtggactcgcgattccttggagcgggttgatgacgtcaaagttcgaatgcc

SEQ ID NO: 70 - DNA, 233 bp, Unknown
  Description of Unknown: Alpaca H1 Bidirectional Promoter sequence
gggaaagggtgggctcacgcagcctttataagactcccaaacttaaagacatttctcggttatggcgacttcccacaagacatagcgacatgcaaatactgcagacctgtggcgccgacccggtcctgtgcagccatctttacggctgggacgcacgcgcgctgcgtgttcccgccctgtgactgcgccggcgattactgggagaggattgatgacgtcaacgttcgggttcc

SEQ ID NO: 71 - DNA, 211 bp, Unknown
  Description of Unknown: Armadillo H1 Bidirectional Promoter sequence
aaagcgatagttttttaaactggacttataaggcacccatatctacgtatatttcatggttagggtgatttcccacaacacatagcgaaatgcaaatatgtggagcgggcgctgaggcgtggtcgggcgcaagcgcgctgcgacttcccgcctttcggccctaggccccagattcctgggagctggatgatgacgttgacgttcggatacc

SEQ ID NO: 72 - DNA, 231 bp, Unknown
  Description of Unknown: Baboon H1 Bidirectional Promoter sequence
ggggaaaggtggtaccatacagaacttataagattcccatactcaaagacatttcacgattatggtgacttcccagaagacacagcgacatgcaaatattgtagggcgtcacaccccctgtccctcacagtcatcttcctgccagggcgcacgcgcgctgggtgttcccgcgtagtgacactgggcccgcgattccttggagcgggttgatgacgtcagcgttcgaattcc

SEQ ID NO: 73 - DNA, 218 bp, Unknown
  Description of Unknown: Bottlenose dolphin H1 Bidirectional Promoter sequence
gccgaaaaccaggctcaagccacatttataaggctcccaaatctaagtacatttgtcggttatggtgacttcccgcaccacattgcgacatgcaaatactgcggagcgtccctcccctggcaactcctcgctgggacgcacgcgcgctacgtgctcccgccttttgactgcgccggcgatacttgggagagggttgatgacgtcagcgttctggctcc

SEQ ID NO: 74 - DNA, 236 bp, Unknown
  Description of Unknown: Bushbaby H1 Bidirectional Promoter sequence
gcctaaaagggcgcttgcacagaatttataaggttcccaaacagagacacatttcattattatggtgacttcccacaatgcacagcgccatgcaaatatgctaggacctgcctccccacacccgctaccttaaggtcgtcaactaaccagtgcgcgcgcgcactgcgcgtttcccgccggtgactcaatgcccgcgtttggtgggagctagttggtgacctcagttctggaggctc

SEQ ID NO: 75 - DNA, 225 bp, Unknown
  Description of Unknown: Cat H1 Bidirectional Promoter sequence
gggaaagggtggccccgccgagcatttataagactcccatacctaaagacatttctcagttatggtgatttcccacaacacacagcaacatgcaaatatcgaggggtgtaccgcccctgtccttagacgtcttctctccaggacgcacgcgcgctgtattcccgccttgtgactctaggcgggcgattcctgggagagggttgatgacgtccaagttctggcttc

SEQ ID NO: 76 - DNA, 230 bp, Unknown
  Description of Unknown: Chimp H1 Bidirectional Promoter sequence
gggaaagggtggtgccacacagaacttataagactcccatatgcaaagacatttctcgtttatggtgatttcccagaacacatagcgacatgcaaatattgcagggcgccactcccctgtccctcactgccatcttcctgccagggcgcacgcgcgctgggtgttcccgcctagtgacactgggcccgcgattccttggagcgggttgatgacgtcagcgttcgaattcc

SEQ ID NO: 77 - DNA, 218 bp, Unknown
  Description of Unknown: Cow H1 Bidirectional Promoter sequence
ggcaaacaccgcacgcaaatagcacttataatgtgctcatacctagagccacttttcggttacggtgacttctcaaaaagacagtggaacatgcaaatattacagtgcgtcccgcccctggtaggtctacgctaggacgcacgcgcactacggttcccgcctatagactgcgctggcgattcctgggagcggactgatgacgtcagcgttcgggatcc

SEQ ID NO: 78 - DNA, 230 bp, Unknown
  Description of Unknown: Crab-eating macaque H1 Bidirectional Promoter sequence
ggggaagggtggtcccacacagaacttataagattcccatactcaaagacatttctcgtttatggtgacttcccagaagacacagcgacatgcaaatattgtagggcgtcacacccctgtccctcacagtcatcttcctgccagggcgcacgcgcgctgggtgttcccgcgtagtgacactgggcccgcgattccttggagcgggttgatgacgtcagcgttcgaattcc

SEQ ID NO: 79 - DNA, 223 bp, Unknown
  Description of Unknown: Dog H1 Bidirectional Promoter sequence
gcagcgcagccctctcgccgcttataaagtgccgcccgcacggcccttctcgctcacggcgacttcccataacacacagcagcatgcaaataccgcggggagccccgccccgccccggcccccgcaccgcctcgggacgcatgcgccggctctccgttcccgccttgggccggcggcgggcgggcgggcgagcgggcgggagcggctccggcgagcgggcgcc

SEQ ID NO: 80 - DNA, 236 bp, Unknown
  Description of Unknown: Elephant H1 Bidirectional Promoter sequence
gggataggaacaaattcgtcaggatttataagactctcagagctgtagacatttcacagttagggcgatgtcccacaatacatagcaacatgcaaatacatgagccttctaggaggccagcctccccgtccgcgtggtcatcttctcgctagggcgcacgcccgctgcgtgttcccgctctgtgaccaggcaggcgattcctgagaaccgcttggtgacgtcagtgttctggctcc

SEQ ID NO: 81 - DNA, 210 bp, Unknown
  Description of Unknown: European Hedgehog H1 Bidirectional Promoter sequence
gcctaaaccggctctttcgacagacttataaggacctcttatcttaggacatttttttgttagggtaacttcccacgatgcatagcgatatgtaaatatggcgccgcgagtctctcctaggcgtctccccaggacgcaggcgcactgcttgttcccgcgttaacattgctgattctgggagactgctgatgacgtcagcgtccagtctac

SEQ ID NO: 82 - DNA, 226 bp, Unknown
  Description of Unknown: Ferret H1 Bidirectional Promoter sequence
gggaaagggtggacccaccgagcatttataaggctcccgcatctaaagacattttacagttatggtgacttcccacaacgcgtagcaacatgcaaatatcgtggagagtaccgcccctgtccccacgcgtcttctcagcacgcacgcacgcgcgctgtgttcccgccctgtgactccaggcgggtatttccaggggcgggtttgctgacaggaacgttcaggcttc

SEQ ID NO: 83 - DNA, 230 bp, Unknown
  Description of Unknown: Gorilla H1 Bidirectional Promoter sequence
gggaaagggtggtcccacacagaacttataagactcccatatccaaagacatttcacggttatggtgatttcccagaacacatagcgacatgtaaatattgcagggcgccactccccagtccctcacagccatcttcctgccagggcgcacgcgcgctgggtgttcccgcctagtgacactgggcccgcgattccttggagcgggttgatgacgtcagcgttcgaattcc

SEQ ID NO: 84 - DNA, 230 bp, Unknown
  Description of Unknown: Green monkey H1 Bidirectional Promoter sequence
ggggaagggtggtcccttacagaacttataagattcccaaactcaaagacatttcacgtttatggtgacttcccagaagacatagcgacatgcaaatattgcagggcgtcacacccctctccctcacagtcatcttcctgccagggcgcacgcgcgctgggtgttctcgcgtagtgacactgggcccgcgattccttggagcgggttgatgacgtcagcgttcgaattcc

SEQ ID NO: 85 - DNA, 220 bp, Unknown
  Description of Unknown: Guinea pig H1 Bidirectional Promoter sequence
gagaaagaaaggctcaaacctagccttataaggctcccaaatgtcggtatattttttggttatggtgacttcccacaatgcatagcgatatgtagatataggagtacctcccacttctggtccgtcagctcttttctaggacgcgcgcgctgcaggtttccagcctgtgattgggccagcaattccgggaatgaattgatgacgtcagcgtttgaattcc

SEQ ID NO: 86 - DNA, 224 bp, Unknown
  Description of Unknown: Horse H1 Bidirectional Promoter sequence
gggggaaaacagcccatggctgcatttataagactcacagatctaaagccatttcacgaatagggtgacttcccacaatacacagcgacatgcaaacatagcggggcgtgcctttcctgtacctgggcatctctcctggacgcacgcgcgccgggtgttcccgcgctgtgactctaggcaagcgcttcctgggagagagttgatgacggcagcattcgggctcc

SEQ ID NO: 87 - DNA, 230 bp, Homo sapiens
gggaaaaagtggtctcatacagaacttataagattcccaaatccaaagacatttcacgtttatggtgatttcccagaacacatagcgacatgcaaatattgcagggcgccactcccctgtccctcacagccatcttcctgccagggcgcacgcgcgctgggtgttcccgcctagtgacactgggcccgcgattccttggagcgggttgatgacgtcagcgttcgaattcc

SEQ ID NO: 88 - DNA, 225 bp, Unknown
  Description of Unknown: Kangaroo Rat Bidirectional Promoter sequence
aggaaagacttcgctgaggcagactttataaggctcccgcgcagaaagaaactttatagttatggtgatttcccacaagccactgcgtcatgcaaataaagcagggtacggcttccatgtaccttaaggtttttttctaggccgcgtacgctctgcgtattcagccacgtgaccctgagccagtggttgttgggagcacgttgtggacctctgcgtttggattcc

SEQ ID NO: 89 - DNA, 233 bp, Unknown
  Description of Unknown: Large flying fox H1 Bidirectional Promoter sequence
gcgagaaaaattcttcacgcagaatatataaggatcccatatctgaagacattttacgattacggcgatttcccacaacacatagcgacatgtaaatgtagtggggcatgcctcccctgtccctgggcagcttctcgccagaacgcacgcgcggtgcgtgttcccgccttgtgactaagttggcgagtcagggaggagattgatgatgtcatcatcgtcagctcacccgctcc

SEQ ID NO: 90 - DNA, 225 bp, Unknown
  Description of Unknown: Little Brown Bat H1 Bidirectional Promoter sequence
gggagaaggaggcgtagaggatatataaggcccccttatgtgtagtccttttacggttagggtgacttcccacaacgcatagcgacatgcaaatttgacgggcgtgcctcctctgtccctgcgggcaacttctctcctggacgcgcgcgcgctgcgtgttcccgccttttgactccagccgagcgaatcctgggagagggcaggtgacgtcaacagtcaggctcg

SEQ ID NO: 91 - DNA, 229 bp, Unknown
  Description of Unknown: Marmoset H1 Bidirectional Promoter sequence
gaggaaaagtagtcccacagacaacttataagattcccataccctaagacatttcacgattatggtgacttcccagaagacacagcgacatgcaaatattgcaggtcgtgtttcgcctgtccctcacagtcgtcttcctgccagggcgcacgcgcgctgggtttcccgccaactgacgctgggctcgcgattccttggagcgggttgatgacgtcagcgtttgaattcc

SEQ ID NO: 92 - DNA, 176 bp, Mus musculus
ttcaggatgtagaccggccgccactataaggctcgaaagaggaataaatttttcgtttagggtgatttcccacaaagcacagcgcgtaatttgcatgcgctctaccccaggctcctgtgctagacaagaagcccgcgcatccgggcaagggatgatgacgtcgtccttcaagagcg

SEQ ID NO: 93 - DNA, 175 bp, Mus musculus
ttcaggatgtagaccggccgccactataaggctcgaaagaggaataaatttttcgtttagggtgatttcccacaaagcacagcgcgtaattgcatgcgctctaccccaggctcctgtgctagacaagaagcccgcgcatccgggcaagggatgatgacgtcgtccttcaagagcg

SEQ ID NO: 94 - DNA, 201 bp, Unknown
  Description of Unknown: Northern Treeshrew H1 Bidirectional Promoter sequence
gggggaagctgggtccactgagttcttataaggtttccagtcctagagcgattttaccattgcggtgatttcccagcatccgtagctacatgcaaatagcgcggggcgcgtctctcaggtccctccccgccctctcactgtacgtacccgcgtcctagggacgccgcgcccggggttcccggacgtcagcgttccgacgca

SEQ ID NO: 95 - DNA, 229 bp, Unknown
  Description of Unknown: Orangutan H1 Bidirectional Promoter sequence
gagaaagggtggtcccgtccagaacttataagattcccatacccaaagacatttcacgtttatggtgacttcccagaatgcatagcgacatgcaaatattgcagggcgtcactcccctgtccctcacagccatcttcctgccagggcgcccgcgcgctggtgttcccgcctagtgacactgggcccacgattccttggagcgggttgatgacgtcagcgctcgtattcc

SEQ ID NO: 96 - DNA, 228 bp, Unknown
  Description of Unknown: Panda H1 Bidirectional Promoter sequence
agggaaagccgcgcctggggcggatttataaggcttccatatctaaaggcatttcacagtcatggtgacttcccacaatacatagcaacatgcaaatatcgcggggagaacctcccctgtcccttgtacgcggcttctaaagacgcacgcacgcgctctgtgttcccgccctgtgactctaggcgggcaattcctgggacagtgttctgacgggaacgttcaggctcc

SEQ ID NO: 97 - DNA, 225 bp, Unknown
  Description of Unknown: Pig H1 Bidirectional Promoter sequence
ggaaaactgcttctgtgagcacttataaaactcccataagtagagagatttcatagttatggtgatttcccataagacattgcgacatgcaaatattgtggcgcgttcgtccccgtccggtgcaggcagcttcgctccaggacgcacgcgcaatacatgttcccgccttgagactgcgccggcagattcctaggaagtggttgatgacgtcgatgttagggatcc

SEQ ID NO: 98 - DNA, 196 bp, Unknown
  Description of Unknown: Pika H1 Bidirectional Promoter sequence
gggggaagctgggctcgatcagcctttataaagctccaaaaactcaagacatttttccgttacggtggcttcccacagtacacagcgacatgcaaataggcggaccgcttcccgctccggcgcaggcgcgcgggcgctgtctcccctggacgcgcgctcgcggttcccgggagctggctgatgacgttcggtctcc

SEQ ID NO: 99 - DNA, 197 bp, Unknown
  Description of Unknown: Rabbit H1 Bidirectional Promoter sequence
ggggagaggtggatccgaacagactttataaagctccgaaagcccaaggcatctttcccttacggtagcttcccacaagacatagcgacatgcaaatttcagacgcgcttctcgccacagcgcaagcgcgctgtgtgctgacgcgggaacgggccagggcgcggttcccgggagcgggttgatgacgttagatctcc

SEQ ID NO: 100 - DNA, 176 bp, Unknown
  Description of Unknown: Rat H1 Bidirectional Promoter sequence
aggagtgtgaagacctgccgccataataagactccaaaagacagtgaatttaacacttacggtgacttcccacaaagcacagcgtgtaatttgcatgcgctctagcccaggctccagctccggaccagaagcccgcgcatcccggcaaagggtgatgacgtcgtccttcaagcgct

SEQ ID NO: 101 - DNA, 225 bp, Unknown
  Description of Unknown: Rock Hyax Bidirectional Promoter sequence
agggtaaatcggcgctgctcagcatttaaaagaatcccaaatgtgtcgccattttacgcttagggtgatatcccacaagacacagcgacatgcaaatatcgtgagtctctgtttccctgtccacgagggcgtcctctcgctggggcgcacgcgcggtgtgtgtgcccccgttgtgtgttcccgcgattccaaagaactggttgataacgttagacttccggctgc

SEQ ID NO: 102 - DNA, 216 bp, Unknown
  Description of Unknown: Sheep H1 Bidirectional Promoter sequence
ggcgaacaatgcgcgcaaacagcatttataatgagctcatacctaaagccactttacggttacggtgacttcccacaagacattgcggcatgcaaatattttagtgcgtcccgcccctggtagttccacgctaggacgcacacgcactacggttcccgcctttagactgcgctggcgattccaggagcggactgatgacgtcagcgttggggctcc

SEQ ID NO: 103 - DNA, 211 bp, Unknown
  Description of Unknown: Squirrel H1 Bidirectional Promoter sequence
gaaagggactccgcacaagcagagtttataaggctcccatctgtacagccatttctcggtcatggtaactacccacaacacacagcgatatgcaaatatagcagagcgtgtcttcccgcgcgcgcctggtcgtctcggcgccggcgccggaactgtgacagagaccctgcgattcctgggagctggctgatgacatcagtgtctaacctcc

SEQ ID NO: 104 - DNA, 228 bp, Unknown
  Description of Unknown: Tarsier H1 Bidirectional Promoter sequence
gcgagagggtgggtccacacagagcttataaggcttcacaagtaaagatatttcacggtgacggtgacttcccacaatacactgcgacatgcaaatatagccgggcgtgcctccccgatcccggaagagcgactcctagccagtgcgcacgcgcgctgcgtgttcgcgtcctaggtcgctgggcccgcggttcctgggagcgggtggtgacgtcagcggcccagcttc

SEQ ID NO: 105 - DNA, 211 bp, Unknown
  Description of Unknown: Two-Toed Sloth H1 Bidirectional Promoter sequence
agaaaaaaatagtttatgctggatttataagattcccaaatctaaagccatttcacagttacggtgattccccactacacacggcgatatgcaaatatagcggaagtgttcctgaggcgtggtaaagcgcgcgcgcgctgagagttcccgccctgtggtgctgggctggagatgcctgagaactggctgatgacggcaacgttcgggctcc

SEQ ID NO: 106 - DNA, 223 bp, Unknown
  Description of Unknown: White cheeked gibbon H1 Bidirectional Promoter sequence
ggggaaaagtagtagaccttataagattcccaaacccaaagacatttctcgtttatggtgacttcccagaagacatagcgacatgcaaatattgcagggcgccactcccctgtccctcacagccatcttcctgccagggcgcacgcgcgctgggtgttcccgcctagtgacactcggcccgcgattccttggagcgggttgatgacgtcagcgttcgaattcc

SEQ ID NO: 107 - DNA, 135 bp, Homo sapiens
cctgccccgcctctgggagagaaggcggatccctaacgccagctatctccaagagcaacattgccgcagcacttccgggacgtcgtgctgcaaaggacgccgctgttatacgtcacttccacggctcagcgtcag

SEQ ID NO: 108 - DNA, 394 bp, Homo sapiens
cctgccccgcctctgggagagaaggcggatccctaacgccagctatctccaagagcaacattgccgcagcacttccgggacgtcgtgctgcaaaggacgccgctgttatacgtcacttccacggctcagcgtcaggcaagttggcctctctgttgtaaattagtggttaaggttatctattattgccacttttccagcgctaaaggctgttttggaaccagtgttgcttgttccgcgggtgattggcttttttttttggcaaaccagttattcaagtttctggtctttaaaaaactctgtggcggtacggtaaccgaggaggttccagcgcggcggaagtaccccgcgggtgggtgtgtgcgcaaggccagggccagaggggcacgtggcgccg

SEQ ID NO: 109 - DNA, 135 bp, Macaca mulatta
cccaccccgcctctggaagagaaggcggatccctaacgccagctatctccaagagcaacattgccgcagcacttccgggacgtcgtgctgcgaaggacgcagctattatacgtcacttccacggcgcggcgttag

SEQ ID NO: 110 - DNA, 135 bp, Artificial Sequence
  Description of Artificial Sequence: Synthetic polynucleotide
cctaccccgcctctggaagagaaggcggatccctaacgccagctatctccaagagcaacattgccgcagcacttccgggacgtcgtgctgcgaaggacgcagctattatacgtcacttccacggcgcggcgttag

SEQ ID NO: 111 - DNA, 135 bp, Papio anubis
cctacccagcctccggaagagaaggcggatccctaacgccagctatctccaagagcaacattgccgcaccacttccgggacgtcgtgctgcgaaggacgcagttattatacgtcacttccacggcgcggcgttag

SEQ ID NO: 112 - DNA, 135 bp, Artificial Sequence
  Description of Artificial Sequence: Synthetic polynucleotide
cctacccagcctccggaagagaaggcggatccctaacgccagctatctccaagagcaacattgccgcaccacttccgggacgtcgtgctgcgaaggacgcagctattatacgtcacttccacggcgcggcgttag

SEQ ID NO: 113 - DNA, 131 bp, Artificial Sequence
  Description of Artificial Sequence: Synthetic polynucleotide
cctgccccgcctctgggagagaaggcggatccctaacgccagctatctccaagagcaacattgccgcagcacttccgggacgtcgtgctgggacgccgctattatacgtcacttccacggctccgcgttag

SEQ ID NO: 114 - DNA, 135 bp, Callithrix jacchus
cccgccccgcccccggtagagagggcggatctctaacgccaactatctccaagagcaacattgccgcagcacttccgggatgtcgtgctgcgaaggacgccgctattgtacgtcacttccgcttctccactctag

SEQ ID NO: 115 - DNA, 135 bp, Pan paniscus
cctgccccgcctctgggagagaaggcggatccctaacgccagctatctccaagagcaacattgccgcagcacttccgggacgtcgtgctgcaaaggacgccgctgttatacgtcacttccacagctcagcgtcag

SEQ ID NO: 116 - DNA, 135 bp, Pan troglodytes
cctgccccgcctctgggagagaaggcggatccctaacgccagctatctccaagagcaacattgccgcagcacttccgggacgtcgtgctgcaaaggacgccgctgttatacgtcacttccacggctccgcgtcag

SEQ ID NO: 117 - DNA, 135 bp, Pongo abelii
cctgccccgcctctgggagagaaggcggatccctaacgccagctatctccaagagcaacgttgccacagcacttccgggacgtcgtgctgcaaaagacgccgctgttatacgtcacttccacggctcagcgttag

SEQ ID NO: 118 - DNA, 135 bp, Nomascus leucogenys
cctgccccgcctctgggagagaaggcggatccctaactccagctatctccaagagcaacattgccgcagcacttccgggacgtagtgctgcaaaggacgccgctgttatacgtcacttccacgtctcagcgttag

SEQ ID NO: 119 - DNA, 131 bp, Chlorocebus sabaeus
cctaccccacctctggaagggaaggcggatccctaacgccagctatctccaagagcaacattgccgcagcacttccgggacgtcgtgctgggacgcagctattatacgtcacttccacggcgccgcgttag

SEQ ID NO: 120 - DNA, 135 bp, Propithecus coquereli
ctggcccagcctcttatggcgggggcggaccccttacgccagctatcgcccagggcaatatggcgacatcacttccggtatgtcaggttgtgaaaggcgccgctattgtacgtcacttccgctgcccagcgcggg

SEQ ID NO: 121 - DNA, 133 bp, Castor canadensis
cacaactcgcctctgagagaggaggcggatccctaacgcctgctatctccaagggcaacactgcggcatacttccggaacgtcagctcgatgggacgcggttattttacgtcacgtccgctactctcactcgg

SEQ ID NO: 122 - DNA, 135 bp, Unknown
  Description of Unknown: calJac3 Gar-1 sequence
cccgccccgcccccggtagagagggcggatctctaacgccaactatctccaagagcaacattgccgcagcacttccgggatgtcgtgctgcgaaggacgccgctattgtacgtcacttccgctgctccactctag

SEQ ID NO: 123 - DNA, 125 bp, Unknown
  Description of Unknown: otoGar3 Gar-1 sequence
ctcggcgtcagtctcaggcagaaagggcggaaaccggaccccagcgcaatgtcacggcagcacttccggttatgctccgttgcaaaagacgctgctattgtacgtcacttccgccacccggctgg

SEQ ID NO: 124 - DNA, 123 bp, Unknown
  Description of Unknown: speTri2 Gar-1 sequence
acgcccgacgggagaggaggcgggtccctaactccgctatctcctagggcaactcgacggcaatacttccggtaacgtcctgacgtaatggatgccgtttcgctttacttccgctttctcttg

SEQ ID NO: 125 - DNA, 95 bp, Unknown
  Description of Unknown: micOch1 Gar-1 sequence
acgccccgctgtctccaagggcaacgagagacctcacttcctgaaacgtctcgtacagagggcgctgctattctatgtcacttccgctccccggg

SEQ ID NO: 126 - DNA, 124 bp, Unknown
  Description of Unknown: criGri1 Gar-1 sequence
aagcctcactataggacggaaggatccagactcccgctgtctccaagggcaacgcgctaccacacttccggaaacgtcgcgtacggagggcactgctattttgcgtcacttccgctaccccggc

SEQ ID NO: 127 - DNA, 124 bp, Unknown
  Description of Unknown: mesAur1 Gar-1 sequence
acgcctcactctagaacggaagactccagacgcccgccgtctccaagggcaacgcgcgaccacacttccggaaacggcgcgtacggagggcgcttctattttgcgtcacttcctctcctccagg

SEQ ID NO: 128 - DNA, 123 bp, Unknown
  Description of Unknown: mm10 Gar-1 sequence
acgcctcactgtagcacggaaggactcaaacaactccgtttccaagggcaacgcgccgccacacttccggaaacgtcgcgtacggagggcgctgcgattttgcgtcacttccgccacctctag

SEQ ID NO: 129 - DNA, 136 bp, Microcebus murinus
gcggcgccagcctctgggagagggggcggacccttacgccagctgtctccaagggcaatatagcggcagcacttccggtagcgacaggttgtgaaagacgccgctgttgtacgtcacttccgctgcccagagcgag

SEQ ID NO: 130 - DNA, 142 bp, Cavia porcellus
cgagttgcttcgggcctactaacatcatgcggcgtttctggaagaggagcccgcttccggacgcccgccgtctccaggggcaacacttccgtgaacgtcatgtgtaagggacgggttacgtcacttcctgtgctccttggct

SEQ ID NO: 131 - DNA, 131 bp, Marmota marmota
cgcccgacttctggcaagaggaggcgggtccctaactccgctatctcctagggcaacacgacggcaatacttccggtaacgtcctgacgtaatggttgccgtttcgctttacttccgctttctcttgctaa

SEQ ID NO: 132 - DNA, 132 bp, Sciurus vulgaris
cgcccagcctccgggaagaggaagcagctcccgaataccggctatctccaagggcaacaccactgcaatgcttccggaaacgtcatggcgtaatggacgccgttacaacttcacttccgcttctctcgctac

SEQ ID NO: 133 - DNA, 131 bp, Mus caroli
cacgcctcaacagctgttagcacggaaggacccaaacaaccccgtctccaagggcaatgcgccgccacacttccggaaacgtcgcgtacggagggcgctgcgattttgcgtcacttccgccacctctagcg

SEQ ID NO: 134 - DNA, 131 bp, Mus musculus
cacgcctcaccagctgttagcacggaaggactcaaacaactccgtttccaagggcaacgcgccgccacacttccggaaacgtcgcgtacggagggcgctgcgattttgcgtcacttccgccacctctagcg

SEQ ID NO: 135 - DNA, 131 bp, Mus spretus
cacgcctcaccagctgttagcacggaaggactcaaacaactccgtctccaagggcaacgcgccgccacacttccggaaacgtcgcgtacggagggcgctgcgattttgcgtcacttccgccacctctagcg

SEQ ID NO: 136 - DNA, 101 bp, Mus pahari
cccaaacaaccccgtctccaagggcaacgcgtcgccacacttccggaaacgtcgcgtacggagggcgctgcgatttcgcgtcacttccgccacctctagcg

SEQ ID NO: 137 - DNA, 140 bp, Oryctolagus cuniculus
caaccgtaaaccccagcagaaagaacaggcggagccctaacaccaaccttctcccggagacacgccccctgctgcacttccggaatgttctggggcaaagggcgccgctattatacgtcacttccgccgcggttctttcg

SEQ ID NO: 138 - DNA, 134 bp, Balaenoptera musculus
cagccgagccgctgggagaggggcggtccctgacgccagccatcgccaagggcaacgccgcggggcggcacttcctgcaacgtcacgctgccaaggacgccgctattgtacgtcacttcctccgctctccgtag

SEQ ID NO: 139 - DNA, 135 bp, Delphinapterus leucas
caagccgatccgctgggagaggggcggtccctgacgccagccatcgccaagggcaacgccgcggggaggcacttcctgcaacgtcacgctgcaaaggacgccgctattgtacgtcacttcctccacttcccggag

SEQ ID NO: 140 - DNA, 135 bp, Monodon monoceros
caagccgatccgctgggagaggggcggtccctgacgccagccatcgccaggggcaacgccgcggggcggcacttcctgcaacgtcacgctgcaaaggacgccgctattgtacgtcacttcctccacttcccggaa

SEQ ID NO: 141 - DNA, 135 bp, Phocoena sinus
caagccgatccgctgggagaggcgcggtccctgacgccagccatcgccaagggcaacgccgcggggcggcacttcctgcaacgtcacgctgcaaaggacgccgctattgtacgtcacttcctccgctctccgtag

SEQ ID NO: 142 - DNA, 135 bp, Physeter catodon
caaaccgagccgctactagaggggcggtccctcacgccagccatcgccaagggcaacgccgcggggcggcacttcctgcaacgtcacggcgcaaaggacgccgctattgtacgtcacttcctccgctctccgtag

SEQ ID NO: 143 - DNA, 135 bp, Bos grunniens
cttgctgggccgcggggagaggggcggaccctgacgccagtcatcgccaagggcaacgccgcagagcggaacttcctgcaacgtcatgcttccaaggacgccgatattgtgtgtcacttcctctgctcgccgtag

SEQ ID NO: 144 - DNA, 135 bp, Capra hircus
cttgcccggccgcggggagaggggcgggccctgacgccagttatctccaagggcaacgccgcagagcggaacttcctgcaacgtcatgcttcaaaggacgctgatattgtatgtcacttcctctgctcgccgtag

SEQ ID NO: 145 - DNA, 135 bp, Ovis aries
cttcccgggccgcggggagaggggcgggccctgacgccagttatctccaagggcaacgccgcagagcggaacttcctgcaacgtcatgcttcaaaggacgctgatattgtatgtcacttcctctgctggcagtag

SEQ ID NO: 146 - DNA, 135 bp, Ovis aries
cttgccgggccgcggggagaggggcgggccctgacgccagttatctccaagggcaacgccgcagagcggaacttcctgcaacgtcatgcttcaaaggacgctgatattgtatgtcacttcctctgctggcagtag

SEQ ID NO: 147 - DNA, 135 bp, Cervus hanglu
ctggccgggcggcgggcagaggggcgggccctgacgccagtcgtcgccaagggcaacgccgcagagcggaacttcctgcaacgtcatgcttcagaggacgccgatattgtatgtcacttcctctgctcgccatag

SEQ ID NO: 148 - DNA, 134 bp, Catagonus wagneri
cccgcctggccactgggagaggggcagtccctgacgccagtcatcgccaaagggcaaccccgcggggttcctgcaagcaacgtcatgccgcaaaggacgccgctattttacgtcacttcctctgctcccgttag

SEQ ID NO: 149 - DNA, 139 bp, Sus scrofa
cccgcctcgccactgggagaggggcggtgcctgatgccaaccatcgccaagggcaacctcgcggggcagaagttccggcgagtaacgtcatgccgcaaaggacgccgctattttacgtcacttcctctgctcccattag

SEQ ID NO: 150 - DNA, 133 bp, Camelus dromedarius
cccgccgggctgctgggagagaggcggtccctgacgccagccatctccaagggcaaccccgcggcggcacttcctgcagcgccctaaggtaaaagacgccgctattgtacgtcacttcctttgctcgcggtag

SEQ ID NO: 151 - DNA, 126 bp, Equus caballus
aacccgggcgccgggagagggcggacccctgacgccgccgtcaccagggcaaccctgcgggcacttcctgcaacgtcgcggcaaaggacgccgctattacacgtcacttcctctgctcgtcggtag

SEQ ID NO: 152 - DNA, 135 bp, Canis lupus
ccgccaggtccccgggagaggggggcggaactctcacgccaaccatctcccggggcaacagcgcggccgcacttccgggaacttctcgactcaacggacgccactattatacgtcatttcctccgctcctcgtag

SEQ ID NO: 153 - DNA, 135 bp, Canis lupus
ccgccaggtccccgggagaggggggcggaactctcacgccaaccatctcccggggcaacagcgcggccgcacttccggcaacttctcgagtcaacggacgccactattatacgtcatttcctccgctcctcgtag

SEQ ID NO: 154 - DNA, 124 bp, Unknown
  Description of Unknown: rn6 Gar-1 sequence
aggcctgacgatagagccgaagaacccaaaccacccctgtctccaagggcaacgcggcaccacacttccggaagcgtcgagtacggaaggcgctgctattttgcatcatttccgccacccctag

SEQ ID NO: 155 - DNA, 127 bp, Unknown
  Description of Unknown: hetGla2 Gar-1 sequence
cacgccccactccgggagaggagccgggtctcagacgcctgcggtctccaggggcaacaccgcacaacgcttccgtaaacgtcatgtgcaagggacgtcgttacgtcacttcagcgcgccttcctgg

SEQ ID NO: 156 - DNA, 114 bp, Unknown
  Description of Unknown: cavPor3 Gar-1 sequence
catgcggcgtttcggaagaggagcccgcttccggacgcccgccgtctccaggggcaacacttccgtgaacgtcatgtgtaagggacgggttacgtcacttcctgtgctccttgg

SEQ ID NO: 157 - DNA, 125 bp, Unknown
  Description of Unknown: chiLan1 Gar-1 sequence
catgcccaattctggaagaggaatcgcgtccctgacgcctgttatctccaggggcaacactacggcaatacttccgtaaacgtcatatgtaagggacgctaaacgtcacttcctgtactccttgg

SEQ ID NO: 158 - DNA, 112 bp, Unknown
  Description of Unknown: octDeg1 Gar-1 sequence
cgtgcctaactccggaattggacccgcgttccggacaccgctgtttcctggggcaacacttccgtaaacgtcataagcaagggacggcgacgtcacttcctgtgttccgcgg

SEQ ID NO: 159 - DNA, 128 bp, Unknown
  Description of Unknown: ochPri3 Gar-1 sequence
aagggcgagccccgggctgacgggcggatccccaatgccctccatctcccggagcaactcggcacttccgcaaagttccgcggccaaggacgccgcttttgtgcgtcacttccgccgctggacgcggg

SEQ ID NO: 160 - DNA, 139 bp, Unknown
  Description of Unknown: susScr3 Gar-1 sequence
cccgcctcgccactgggagaggggcggtgcctgatgccaaccatcgccaagggcaacctcgcggggcagaagttccggcgagtaacggcatgccgcaaaggacgccgctattttacgtcacttcctctgctcccattag

SEQ ID NO: 161 - DNA, 133 bp, Unknown
  Description of Unknown: vicPac2 Gar-1 sequence
cccgccgggctgctgggagagaggcggtccctgacgccagccatctccaacggcaaccccgcggcggtacttcctgcagcgccctaaggtaaaggacgccgctgttgtacgtcacttcctctgctcgcggtag

SEQ ID NO: 162 - DNA, 133 bp, Unknown
  Description of Unknown: camFer1 Gar-1 sequence
cccgccgggctgctgggagagaggcggtccctgacgccagccatctccaagggcaaccccgcggcggcacttcctgcagcgccctaaggtaaaggacgccgctattgtacgtcacttcctctactcgcggtag

SEQ ID NO: 163 - DNA, 135 bp, Unknown
  Description of Unknown: turTru2 Gar-1 sequence
caagccgatccgctgggagaggggcggtccctgacgccagccattgccaagggcaacgccgcggggcggcacttcctgcaacgtcacgctgcaaaggacgccgctattgtacgtcacttcctccgctcgccgtag

SEQ ID NO: 164 - DNA, 135 bp, Unknown
  Description of Unknown: orcOrc1 Gar-1 sequence
caagccgatccgctgggagaggggcggtccctgacgccagccatcgccaagggcaacgccgcggggcggcacttcctgcaacgtcacgctgcaaaggacgccgctattgtacgtcacttcctccgctcgccgtag

SEQ ID NO: 165 - DNA, 134 bp, Unknown
  Description of Unknown: panHod1 Gar-1 sequence
cttgccgggccgcggggagagggcgggccctgacgctagttatctccaagggcaacgccgcagagcggaacttcctgcaacgtcatgcttcaaaggacgctgatattgtacgtcacttcctctgctcgcagtag

SEQ ID NO: 166 - DNA, 136 bp, Unknown
  Description of Unknown: dasNov3 Gar-1 sequence
gccgccagggactgggaggaacagcctaattcccaacacctcccgtttcctagggcaacaaagcggcgtcacttcctgtaacgccctgacgcaaaggacgttgccatcctacgccacttccgctactctccggtag

SEQ ID NO: 167 - DNA, 114 bp, Unknown
  Description of Unknown: jacJac1 Gar-1 sequence
caggggggaagggaaccccggcgccagcatctcccagggcaacgcggcaagcacttccggggggagtctggagacggagacgccgttattttacgtcacttccgctgtcgctct

SEQ ID NO: 168 - DNA, 121 bp, Unknown
  Description of Unknown: eleEdw1 Gar-1 sequence
tttagaaaaaaaattggaccactaacgccaggcatctccaagggcaacaaagccgtcccacttcctaacgtcatcaggaaaggcacgctgtgcttacgtcatttcctttgcttgacggcag

SEQ ID NO: 169 - DNA, 112 bp, Unknown
  Description of Unknown: tupChi1 Gar-1 sequence
gggaggggcggcgcccggggccagctgtctcccggggcaacctcgcggggcgcttccggcgacgccatgcagccacggacgccgtgacgtcacttccgccacgcagcgccgg

SEQ ID NO: 170 - DNA, 135 bp, Artificial Sequence
  Description of Artificial Sequence: Synthetic polynucleotide
cctgccccgcctctgggagagaaggcggatccctaacgccagctatctccaagagcaacattgccgcagcacttccgggacgtcgtgctgcaaaggacgccgctgttatacgtcacttccacggctcagcgttag

SEQ ID NO: 171 - DNA, 131 bp, Artificial Sequence
  Description of Artificial Sequence: Synthetic polynucleotide
cctaccccgcctctggaagagaaggcggatccctaacgccagctatctccaagagcaacattgccgcagcacttccgggacgtcgtgctgggacgcagctattatacgtcacttccacggcgccgcgttag

SEQ ID NO: 172 - DNA, 138 bp, Ursus thibetanus
ccgccaggtccccaggaggggaggagggggtgttcactaacgccagccatctcccagggcaacaccgcggcggcacttcctgcaacttcttgattgaaaggacgccaccattatacgtcatttcctacggaggcgtag

SEQ ID NO: 173 - DNA, 133 bp, Zalophus californianus
ccgccaggcctccgggaaagggggcggatcactaatgccagccatctcccagggcaacaccgcgggggcacttcctgcaacttcttgattcaaaggacgccactattatacgtcatttcctatggaggactag

SEQ ID NO: 174 - DNA, 135 bp, Mandrillus leucophaeus
cccaccccgcctctggaagagaaggcggatccctaacgccagctatctccaagagcaacattgccgccgcacttccgggacgtcgtgctgcggaggacgcagctattatgcgtcacttccacggcgcggcgttag

SEQ ID NO: 175 - DNA, 114 bp, Dipodomys ordii
cccgctccgcctccggcaacagccatctccaccggcgccaacgccgcggcacttccgggacgcctcggcgcgaaggacgcggacctttgacgtcacttccgccgccctcaggag

SEQ ID NO: 176 - DNA, 124 bp, Chinchilla lanigera
catgcccaattcttggaagaggaatcgcgtccctgacgcctgttatctccaggggcaacactacggcaatacttccgaaacgtcatatgtaagggacgctaaacgtcacttccactccttggcg

SEQ ID NO: 177 - DNA, 115 bp, Octodon degus
cgtgcctaactccgggaattggacccgcgttccggacaccgctgtttcctggggcaacacttccgtaaacgtcataagcaagggacggcgacgtcacttcctgtgttccgcggcg

SEQ ID NO: 178 - DNA, 123 bp, Fukomys damarensis
  modified_base (1)..(11): a, c, t, g, unknown or other
nnnnnnnnnnncccgggagaggagccgggtcccagacctctgcggtctccaggggcaacgccacgcaacacttccgaaacgtcatgtgcgagggacgctgtgctcacttccggtgggccactg

SEQ ID NO: 179 - DNA, 124 bp, Heterocephalus glaber
cacgccccactccagggagaggagccgggtctcagacgcctgcggtctccaggggcaacaccgcacaacgcttccgaaacgtcatgtgcaagggacgtcgttacgtcacttccgcgccttcctg

SEQ ID NO: 180 - DNA, 131 bp, Ictidomys tridecemlineatus
cacgcccgacttctgggagaggaggcgggtccctaactccgctatctcctagggcaactcgacggcaatacttccggaacgtcctgacgtaatggatgccgtttcgctttacttccgctttctcttgctaa

SEQ ID NO: 181 - DNA, 128 bp, Spermophilus dauricus
gcccgacttctgggagaggaggcgggtccctaactccgctatctcctagggcaacacgtcggcaatacttccggaacgtcctgacgtaatggatgccgtttcgctttacttccgctttctctggctaa

SEQ ID NO: 182 - DNA, 128 bp, Urocitellus parryii
gcccgacttctgggagaggaggcgggtcgctaactccgctatctcctagggcaacacgacggcaatacttccggaacgtcctgacgtaatggacgccgtttcgctttacttccgctttctcttgctaa

SEQ ID NO: 183 - DNA, 126 bp, Jaculus jaculus
  modified_base (1)..(10): a, c, t, g, unknown or other
nnnnnnnnnncccagcgggggaagggaaccccggcgccagcatctcccagggcaacgcggcaagcacttccggggggagtctggagaagacgccgttattttacgtcacttccgctgtcgctctag

SEQ ID NO: 184 - DNA, 117 bp, Myotis lucifugus
gagagagccggtctccacctccggggatatcccggggcaaagccgcggtgacacttccggaacgtcaggatgccacggacgcggctgttttacgccacttccttggcttgtcggaag

SEQ ID NO: 185 - DNA, 118 bp, Pteropus vampyrus
ggagaagggtggggcctcaccccagacgtttcctagggcaacaccacggcggcacttccggaacgttgagatgcaacggacgccgctattatacgtcacttcctcggctcgtcgatag

SEQ ID NO: 186 - DNA, 128 bp, Choloepus hoffmanni
accgctcggggcctaagaaagattcttaacgccagtcacctccaagagaaacagagcagttgctcttcctgaacgccacgacgcaaagggcgttgccattgtacgtcacttcctcaactctctggcag

SEQ ID NO: 187 - DNA, 135 bp, Dasypus novemcinctus
gccgccagggagctgggaggaaagcctaattcccaacacctcccgtttcctagggcaacaaagcggcgtcacttcctgaacgccctgacgcaaaggacgttgccatcctacgccacttccgctactctccggtag

SEQ ID NO: 188 - DNA, 129 bp, Procavia capensis
ttctccaggctcctggatgaaggggcggatccttaacgccaaccatctccaacggcaacaacgcaggggcacttcctttacgacaggacgcaacggaagctcttggcgtacgtcacttctgcttgtcag

SEQ ID NO: 189 - DNA, 126 bp, Unknown
  Description of Unknown: equCab2 Gar-1 sequence
cccgggcgccggagagggcgggacccctgacgccgccgtcaccaagggcaaccctgcgggcacttcctgcaaacgtcgcgccaaaggacgccgctattacacgtcacttcctctgctcgtcggtag

SEQ ID NO: 190 - DNA, 131 bp, Unknown
  Description of Unknown: cerSim1 Gar-1 sequence
cccccgggccgccgggagggggtagacccccgacgccggccgtcaccagggcaacagcgcgcggcacttcctgcaacgccgcgaggcagaggacgccgccattatacgtcacttcctctgttcgtcgggag

SEQ ID NO: 191 - DNA, 135 bp, Unknown
  Description of Unknown: felCat8 Gar-1 sequence
ccgccggacccccgggagagggagcggatcaccaacgccaaccgtctcccagggcaacaccgaggcggcacttccggcaaggtctggattcaaaggacgccaccattatacgtcatttcctctgctcctcagtag

SEQ ID NO: 192 - DNA, 135 bp, Unknown
  Description of Unknown: musFur1 Gar-1 sequence
cccgcaggctcccgggagagggggcggatcactaacgccagccatctcccagggcaacagcctgatggcacttcctgcagcttctttgcagtcaaaggacgccactattaaacgtcacttcctacgtaggtgaag

SEQ ID NO: 193 - DNA, 138 bp, Unknown
  Description of Unknown: ailMel1 Gar-1 sequence
ccgccaggtccccaggaggggaggagggggagttcactaacgccagccatctcccagggcaacactgcggcggcacttcctgcaacttcttgattgaaaggacgccaccattatacgtcatttcctacggaggcgtag

SEQ ID NO: 194 - DNA, 133 bp, Unknown
  Description of Unknown: odoRosDiv1 Gar-1 sequence
ccgccaggcttccgggaaagggggcggatcactaacgccagccatctcccagggcaacaccgcgggggcacttccggcaacttcttgattcaaaggacgccactattatacgtcatttcctatggaggactag

SEQ ID NO: 195 - DNA, 134 bp, Unknown
  Description of Unknown: lepWed1 Gar-1 sequence
ccgccaggcctccgggaaagggggcggatcactaacgccagccatctcccagggcaacaccgcggcggcacttcctgcaacttcttagattcaaaggacgccactattatacgtcatttcctacggaggactag

SEQ ID NO: 196 - DNA, 134 bp, Unknown
  Description of Unknown: pteAle1 Gar-1 sequence
cctgcagggctgctaggagaagggcggggcctcaccccagacgtttcctagggcaacaccacggcggcacttccggcaacgttgagatgcaacggacgccgctattatacgtcacttcctcggctcgtcgatag

SEQ ID NO: 197 - DNA, 134 bp, Unknown
  Description of Unknown: pteVam1 Gar-1 sequence
cctgaaggtctgctaggagaagggtggggcctcaccccagacgtttcctagggcaacaccacggcggcacttccggcaacgttgagatgcaacggacgccgctattatacgtcacttcctcggctcgtcgatag

SEQ ID NO: 198 - DNA, 140 bp, Unknown
  Description of Unknown: eptFus1 Gar-1 sequence
cccacgagcggctggaagagggccggtctccacctcctccctcccgggacatcccggggcaacaccgcggtgacacttcctggaacgtcaggatgccacggacgcgactatttgacgccacttccttggcttgtcggaag

SEQ ID NO: 199 - DNA, 133 bp, Unknown
  Description of Unknown: myoLuc2 Gar-1 sequence
ccgaccggcggccaggagagagccggtctccacctccggggatatcccggggcaaagccgcggtgacacttcctggaacgtcaggatgccacggacgcggctgttttacgccacttccttggcttgtcggaag

SEQ ID NO: 200 - DNA, 132 bp, Unknown
  Description of Unknown: loxAfr3 Gar-1 sequence
ccctcctggctcccgggagaggtggcagagccctaacgccatccatctccaagggcaacagcgcagcggcacttcctttaacgtcatgatgcaaaggacgctacctacgtcacttcctctgcccgtcgtcag

SEQ ID NO: 201 - DNA, 131 bp, Unknown
  Description of Unknown: triMan1 Gar-1 sequence
tcctcctggctcctagaagagggggcggatccctaacgccagccatctccaagggcaacaacgcgccggcacttcctgtaatgatgcaaaggacgctgctgccgtacgtcacttccttgactcgtcggtag

SEQ ID NO: 202 - DNA, 129 bp, Unknown
  Description of Unknown: chrAsi1 Gar-1 sequence
acctccgggcctctgggagaggggaggattcctaacgcaggtcgtttccaagggtaacaacgcagcggcacttccttcaacgtgtggacgcaacggacgctgcacgtcacttccgctgcctgtccgttg

SEQ ID NO: 203 - DNA, 134 bp, Unknown
  Description of Unknown: oryAfe1 Gar-1 sequence
tccttcaggctgttgggcgtgggggcggatccctaacgccagccatctccaagggtaacaacgtgtgggcacttccacacgtcatgatgcaaaggccattactattgtacgtcacttcctctgcttgtcggtaa

SEQ ID NO: 204 - DNA, 280 bp, Mus musculus
gagagtaagcaggctcttggtaggtatataaggccatagaattttgtaactttacacatgtggtgaccttatgtagccgactgtacttgatattataacaaatcctgaatccgttttagggttaaataatcctttttatactcgcttcgttctaagtttaaattaaaatacttaaatttaggatgtttttactgttaaccaaaatgctttggggctatgcaaaatacaacagtttggattggttaaaccttccgaagccccgcccccgacggccatgtct

SEQ ID NO: 205 - DNA, 672 bp, Unknown
  Description of Unknown: CD2AP Bidirectional Promoter sequence
agcgagcccaagctcctctgcaccgcttcctcatccgctcgctgcacctggacgcggtcggcgcgcgacccccggccgtgacgtcaccgcacctggcagcagccgtggggaccgggagagagcccgaacgcgacggggcggggtggggcggggagaacgagggcgttctcgcgagatttgcctcctcccggtcccagctccccgcaccttctcggcctctgtctgggtccccaccttagtctacggtgtcgccttttctaactgcgagtgctaaggaagaggcgaggggcgggctccgaggctaggcgggcgctcggggttggagccgagggtctgggcaaaccggtgggtccctccccactgcgggagcggccagggtgggaaaaccgcggtcgggcgggcggggtagggccctcccgccgccgtggctcctggggaggccaggggtgaggagctgtcgccgcctttgcctctgcctcgagggccgcgctgaagagactggtaggagagcgccgcgggcggatggaggcgactcttcgccccgcctgagctcaggaggggctagcgcggagcgcgggtcccgcctccagccgcgggagcggccgcgcgagccaccactggaggaggaggaggaggagcggacgtcggcttctccccgcgggagcccccagc

SEQ ID NO: 206 - DNA, 151 bp, Unknown
  Description of Unknown: DCTN6 Bidirectional Promoter sequence
acgcgacgcaaacaagagtcgcaagcttccgggtccccgccccaccccggctccgcccctcccccaaccctgccaggctctccaatcgcatgtggaattatcgctctacccaggcggtggtgtcgatctacgttccaattggggccgtacc

SEQ ID NO: 207 - DNA, 282 bp, Unknown
  Description of Unknown: EMBP1 Bidirectional Promoter sequence
aaaaccttacacctgcgcaaaaataagcctccctcataagaaagcccaaagatgtccggggtcggggaggaggaaagtgtctctcatctgtcccatcaacgaaaattagtgaaatctgcctcagatgaagtgcaaaggccagtctgcagggatagtttcaacctctccccacgcgatgggctacacatcacctgcccaagctctctcccgacctgctagagcctagagggcggaggccggagaggctgcagccgggagtagcaccgcacatccgggaacgcc

SEQ ID NO: 208 - DNA, 503 bp, Unknown
  Description of Unknown: EP400NL Bidirectional Promoter sequence
acccgtctacagtggacacgacgaaaccagggacatgtcccaccatttcagtggtcacaggcaagagtcttgtggatcttcggatcccacgtaacatctcatctccctaggcaccccgactcccctgcccaatttaaaacagacctcagcctgccccatcccggctgctttgcctggtgctcttctaactgcatgtttatctatcctccccgcctagactgtagggcccgcgaggggagccgctagctgtgcttgtcagtgtgaccagcgctcagcaggtgtccggcgggagggcgggcaaatacaactcagtgcccacgtgcgaatgaatgaacaaactagttccgggcggagccagaggcgcgcgccggcgcggaccgaggcccggccctatccgccccgccccctccgccccgccccctccgccacgtccctccgggtccgctgggcgctgattggtccgagcctcgcctgcgcagtgccgggccggctcccgcgcttgc

SEQ ID NO: 209 - DNA, 347 bp, Unknown
  Description of Unknown: FCHO21 Bidirectional Promoter sequence
ccgactccactgccgctggctggcccttctcttccctctgtccctgggccagtgcccgtcgcaccacaaacagtgcgagcagtctccccggtgactcctcaaggacccagttctccaccattcctaagagaacactcaacccagccgcgcccgggatgcagagagatctaccaacacccgagaatggggacagggcgcatgcgcacaccgtggccgtggcgtctaagtgctcgcccagctgcggcagccgctaggtggcgcatgcgccctggaaggtgcgggccggtctctgggaagaaggcggcggcggcgaaaggcgggggtgctgtgggggccgggccgtgttt

SEQ ID NO: 210 - DNA, 397 bp, Unknown
  Description of Unknown: FCHO22 Bidirectional Promoter sequence
ccgactccactgccgctggctggcccttctcttccctctgtccctgggccagtgcccgtcgcaccacaaacagtgcgagcagtctccccggtgactcctcaaggacccagttctccaccattcctaagagaacactcaacccagccgcgcccgggatgcagagagatctaccaacacccgagaatggggacagggcgcatgcgcacaccgtggccgtggcgtctaagtgctcgcccagctgcggcagccgctaggtggcgcatgcgccctggaaggtgcgggccggtctctgggaagaaggcggcggcggcgaaaggcgggggtgctgtgggggccgggccgtgtttacacagcggcgggcgggcgcggacgcggaacccggcgcggcggcggcacg

SEQ ID NO: 211 - DNA, 569 bp, Unknown
  Description of Unknown: KMT5C1 Bidirectional Promoter sequence
cgcggggcgggaggggagagggatggcggtgcgcgcgcattcaccgcctccctcccgccgggtctggctttctccctcctgtggccgaagctttcctcggagaaatagaagagggaggccgcgactctatggtgatggacggaggccttacccaatggaaagaggagctgtcccaaggccaggcaatcatatacgactactggagctggcagagcccgccctctttccacttggacctgaataacccgacccaaaccgagtttcgcccggagagactgcgctttcggccaatgagtgcgtcgatttcgagccccagtgtgagcgaaggcgggacaagtctccatggcagcgactaaaggacagcgatgtgaaccactgacaacagttcgcggcgtttgacggcggcgggggcgtggcggggttttatctgtgtattgacgagagccgggcgcggagggaaagagtggggcttggccaatgggagcgccgtgagcttcgtagcaacggaggagtggcggtggctgtggccaatagaaagcctcagtggccttggcggggctggcccggag

SEQ ID NO: 212 - DNA, 806 bp, Unknown
  Description of Unknown: KMT5C2 Bidirectional Promoter sequence
cgcggggcgggaggggagagggatggcggtgcgcgcgcattcaccgcctccctcccgccgggtctggctttctccctcctgtggccgaagctttcctcggagaaatagaagagggaggccgcgactctatggtgatggacggaggccttacccaatggaaagaggagctgtcccaaggccaggcaatcatatacgactactggagctggcagagcccgccctctttccacttggacctgaataacccgacccaaaccgagtttcgcccggagagactgcgctttcggccaatgagtgcgtcgatttcgagccccagtgtgagcgaaggcgggacaagtctccatggcagcgactaaaggacagcgatgtgaaccactgacaacagttcgcggcgtttgacggcggcgggggcgtggcggggttttatctgtgtattgacgagagccgggcgcggagggaaagagtggggcttggccaatgggagcgccgtgagcttcgtagcaacggaggagtggcggtggctgtggccaatagaaagcctcagtggccttggcggggctggcccggagagcagatgggaggtgcggcgacagtgtttgacgagagccgaaggaggctgtgggaggtgttggcggcggcggcgcgggcgcctgaggaggaggaggagaagcgggtgaggggcggcgcggggcccgatctctgagccccttcacggccccagccccgcgccgccttggctccccagtcgccccctgccccgactgccccccaccccgcccggcccctcctcgtgtccaggcgcccac

SEQ ID NO: 213 - DNA, 513 bp, Unknown
  Description of Unknown: LZTR11 Bidirectional Promoter sequence
tgaaggagctgaggccctgctaagtaggaatgagaatccagaggctcctcgccgggctgcctctcagtcagtaagaaagccaaggggagaggggagttgctgggggtcagggctgagggcgctagcaggaaagggagcgttgagccgcctgcagaggccgctgcgagcccggaaccctccatgggggatcccggcagcggcagacgatccaggccggagccacgcgcagacccagggcatgccgggaactgcgagccggccgcgggtcttcgggctgcgtgggcctgggaggcgccgggaagagcagtcgcgacggggctagggacgacacactgcattcactggaagggacaacgcagcgccagtacatagcctgaaacgctccccagaaggtcccacgctcgccgcgcggtcgacaaccgcatcctgcgctcgcccgcggtgtctcggcaagcggtaggcttgtcgggaagagctggagggcgcaagtgcggcgctggccggacgtgccgc

SEQ ID NO: 214 - DNA, 616 bp, Unknown
  Description of Unknown: LZTR12 Bidirectional Promoter sequence
tgaaggagctgaggccctgctaagtaggaatgagaatccagaggctcctcgccgggctgcctctcagtcagtaagaaagccaaggggagaggggagttgctgggggtcagggctgagggcgctagcaggaaagggagcgttgagccgcctgcagaggccgctgcgagcccggaaccctccatgggggatcccggcagcggcagacgatccaggccggagccacgcgcagacccagggcatgccgggaactgcgagccggccgcgggtcttcgggctgcgtgggcctgggaggcgccgggaagagcagtcgcgacggggctagggacgacacactgcattcactggaagggacaacgcagcgccagtacatagcctgaaacgctccccagaaggtcccacgctcgccgcgcggtcgacaaccgcatcctgcgctcgcccgcggtgtctcggcaagcggtaggcttgtcgggaagagctggagggcgcaagtgcggcgctggccggacgtgccgcaccgtcagcgcagggctcgccgggaaatgtggtttctccagccggcccggggcggtggccgcaagttgggcttacagcgcggccgatccggcgtggacccggg

SEQ ID NO: 215 - DNA, 41 bp, Unknown
  Description of Unknown: PATJ1 Bidirectional Promoter sequence
gagtcggggcgaggggagggcctgccaggtgaggcgcggtc

SEQ ID NO: 216 - DNA, 131 bp, Unknown
  Description of Unknown: PATJ2 Bidirectional Promoter sequence
gagtcggggcgaggggagggcctgccaggtgaggcgcggtcaccctgggcctctcacttccgcccaggtgaggcagggccgacaccgagcccgcccgacccgggctcccacctgctcctccagcgcaccag

SEQ ID NO: 217 - DNA, 293 bp, Unknown
  Description of Unknown: PCNX11 Bidirectional Promoter sequence
ttcacaaatatcataaatgacaggcaggacgcttttctggagtcaagatctgttagtttcggagtcagaaagaccccgtttagagactcgtaggcgaacttgccagggggcctaccaggggcagaatggggtcctccggaccagccagccgcgtctcagccacctccgcagcccccggggccctgaaccccggccgcgttgacgcgcgcttctcccggacgtcggcaggaggcgcccgcggcggaccaggcgcggcgcgcaccgtagccggcccagggggcggagggagcgga

SEQ ID NO: 218 - DNA, 331 bp, Unknown
  Description of Unknown: PCNX12 Bidirectional Promoter sequence
ttcacaaatatcataaatgacaggcaggacgcttttctggagtcaagatctgttagtttcggagtcagaaagaccccgtttagagactcgtaggcgaacttgccagggggcctaccaggggcagaatggggtcctccggaccagccagccgcgtctcagccacctccgcagcccccggggccctgaaccccggccgcgttgacgcgcgcttctcccggacgtcggcaggaggcgcccgcggcggaccaggcgcggcgcgcaccgtagccggcccagggggcggagggagcggagaggaggagctggagggggcgcggcttcctctcggtcg

SEQ ID NO: 219 - DNA, 739 bp, Unknown
  Description of Unknown: PCNX13 Bidirectional Promoter sequence
ttcacaaatatcataaatgacaggcaggacgcttttctggagtcaagatctgttagtttcggagtcagaaagaccccgtttagagactcgtaggcgaacttgccagggggcctaccaggggcagaatggggtcctccggaccagccagccgcgtctcagccacctccgcagcccccggggccctgaaccccggccgcgttgacgcgcgcttctcccggacgtcggcaggaggcgcccgcggcggaccaggcgcggcgcgcaccgtagccggcccagggggcggagggagcggagaggaggagctggagggggcgcggcttcctctcggtcgctccctggcgccgggcctctttctctgcctggcccagggctggcggccggcgggggtcgcggcggcggcagtgggggcgctggcgggccgcgggtggcgggggccgggccgcggctccgggtgttaggagacaagatggcggcggctctcagaaggccggtctcctcctctccgccgtcctccgccccgccgctcgccgcctcctcctctcgggtctcctcctcctcgtttgctgcctcctcctcctcctgcagcagcaccagcgaccgccgaagcgccggctcgctcacccggagctccggaggtggatagacggggcagctgcaggctccggcgaccgaggccgagctggggccggggcggggacggcggcggcggcggcggcgacggcggcggcgccgggtgggg

SEQ ID NO: 220 - DNA, 391 bp, Unknown
  Description of Unknown: PTGFRN Bidirectional Promoter sequence
aatttttggcataggccaagcggctggttggtggggtgtttagctcaggacgagaggccgaacgagcggggagttggctgaggatagactagacacgcgtgggtgactccagcgtgatggaacgcggggtgtcccgggatagggctaaagcgatgggatttccagacgagtctttcccaggccaacttttaaaggtcggaggaaagtttctcgtggggtgggggcccagaggggatggcagggtgggctccgacgcctcctcgcctttaagcgggtggccccggctcttcctccgttacctggagcggggaggggcttgggaaagtttgtgtttgttgctggcaaagcgccggatgggaggcgcgggcgggcgctgcggttcttcccttct

SEQ ID NO: 221 - DNA, 361 bp, Unknown
  Description of Unknown: RMRP Bidirectional Promoter sequence
acgtcctcagcttcacagagtagtattttatagccctaaagaaattgtgttttatgattagggtgagaaagttggtggcgtgagattaaaaaaaccgttttcgggcataactttctaagactataggctttcagaggcattgtggctagcagaatagctaatagacacgaaatgaacaaatacaggaaagctagaatgacactatcttatgcaaatatggtctggccccgccctacggggagtgggcgtggcctccccggagccggccggcctgctcgcgtgcgcgtgcgcgttggggcggccggccaatgccggaccgcttcggcaccgcccgcccgatccctccacccgtgggccggca

SEQ ID NO: 222 - DNA, 246 bp, Unknown
  Description of Unknown: RNF1871 Bidirectional Promoter sequence
ccaggaccttgcaggtggagagcatagttgccaaaatcaaggcggaggagcgcaccgccgctaggatccaggcggagaagcccaccgcggccaggacctaaggatgcagtacactgctgccaggatcttgtctgtggagcgcagcgcggccaggacctccggctgcagcacaccgctgccaggatcttatcggcagagcgctccgcggtccggaccccgccccgtgcgcgtccccgaccccgcccc

SEQ ID NO: 223 - DNA, 367 bp, Unknown
  Description of Unknown: RNF1872 Bidirectional Promoter sequence
ccaggaccttgcaggtggagagcatagttgccaaaatcaaggcggaggagcgcaccgccgctaggatccaggcggagaagcccaccgcggccaggacctaaggatgcagtacactgctgccaggatcttgtctgtggagcgcagcgcggccaggacctccggctgcagcacaccgctgccaggatcttatcggcagagcgctccgcggtccggaccccgccccgtgcgcgtccccgaccccgccccgtgcgcgtccccggcgttggcgtcttcgtcctgttgctggtctccgtccggtcgccggccgtctaggtctccggccctccccagccgctcctgcgcccttgccggccccgccgcccgcagc

SEQ ID NO: 224 - DNA, 512 bp, Unknown
  Description of Unknown: SAMD4B1 Bidirectional Promoter sequence
cgcccactgaggacagccttgggtgaggcgggccacccaaggggcggggaagaggaggcctggaacgcctgaatcaggaactgtgacttcgctcggggcagctggggtggacgcgcgcgagcctgccccctgcgggcctggaggcccaacctcagactccgccgggcccgttgccctgggcaacgccccgcgcgccccgccccttccccgccccccagccccaaaccccaggcctggccgactgcccgtcacccccacgtccgaccaatcccgccgaggagggggcgggcctcttgggccccgttccaccaccgtcgctcccccctcgccgcgaccccgccttactcggctcacacctcccgcccttcgggctgccctcgccgcccgttggctggcgcgccgttcgtcacccgggcgtgagctaatgccggcgcgcggcggcccccgtcggggcggggccaggggcggtgacgcacggcgcggtgacgcagcgcgacggcggcggcggcggc

SEQ ID NO: 225 - DNA, 562 bp, Unknown
  Description of Unknown: SAMD4B2 Bidirectional Promoter sequence
cgcccactgaggacagccttgggtgaggcgggccacccaaggggcggggaagaggaggcctggaacgcctgaatcaggaactgtgacttcgctcggggcagctggggtggacgcgcgcgagcctgccccctgcgggcctggaggcccaacctcagactccgccgggcccgttgccctgggcaacgccccgcgcgccccgccccttccccgccccccagccccaaaccccaggcctggccgactgcccgtcacccccacgtccgaccaatcccgccgaggagggggcgggcctcttgggccccgttccaccaccgtcgctcccccctcgccgcgaccccgccttactcggctcacacctcccgcccttcgggctgccctcgccgcccgttggctggcgcgccgttcgtcacccgggcgtgagctaatgccggcgcgcggcggcccccgtcggggcggggccaggggcggtgacgcacggcgcggtgacgcagcgcgacggcggcggcggcggcggcggcggtggtcggtgcgggaggagggaggggagcttgcgggcccgaga

SEQ ID NO: 226 - DNA, 630 bp, Unknown
  Description of Unknown: SAMD4B3 Bidirectional Promoter sequence
cgcccactgaggacagccttgggtgaggcgggccacccaaggggcggggaagaggaggcctggaacgcctgaatcaggaactgtgacttcgctcggggcagctggggtggacgcgcgcgagcctgccccctgcgggcctggaggcccaacctcagactccgccgggcccgttgccctgggcaacgccccgcgcgccccgccccttccccgccccccagccccaaaccccaggcctggccgactgcccgtcacccccacgtccgaccaatcccgccgaggagggggcgggcctcttgggccccgttccaccaccgtcgctcccccctcgccgcgaccccgccttactcggctcacacctcccgcccttcgggctgccctcgccgcccgttggctggcgcgccgttcgtcacccgggcgtgagctaatgccggcgcgcggcggcccccgtcggggcggggccaggggcggtgacgcacggcgcggtgacgcagcgcgacggcggcggcggcggcggcggcggtggtcggtgcgggaggagggaggggagcttgcgggcccgagagggggcgacggcggcggcggtggcctgaggaggcccgagcggcggcggtggcggcgaaggccgaggcg

SEQ ID NO: 227 - DNA, 94 bp, Unknown
  Description of Unknown: SETD1A1 Bidirectional Promoter sequence
cggaggcgccccctagtcccaggctctgcacgccctggccccgccccttgactcggccccgcccacagcggaatccgcagattcgccaggtcgg

SEQ ID NO: 228 - DNA, 726 bp, Unknown
  Description of Unknown: SETD1A2 Bidirectional Promoter sequence
cggaggcgccccctagtcccaggctctgcacgccctggccccgccccttgactcggccccgcccacagcggaatccgcagattcgccaggtcggatcctcagaattcctcgggtccctcgatactcggctgaaaattctcatcggactctgagaggagcgctgggctggaggcattttccccagggacagaagcgggctattctctcacttgggccagtaagaaaaatccaaaaaaagttgtcgactctgccagcagggattggctaacgggccgttattttcttgactccaccaaggcggatgaaggggaggctacggctgaggccgggaacagtggcgaatctgcagcctctcagaatttggcagtgcaaggaagggacggggaagagaagcaaagcggcgcgcatcctgtccagcgattcgccccgcccgcccggtgaatctgcgtctgcagaacgcgccactgaaggttccccagcgctggctggcctcctcccctccgccccgccccttttcctcagggactagtcgcagctttcgtcgccgccgattcgtcaaggtcccgggccgcagcatctagatcgtcgtggcgaagccgactctccgggggatgcggccaatctccaagctccctgggccgcaacttccgagcctcccagggcgccggccgaggcgaagccgctaccctcggccccgtgggtcccccggcagcgcctgtggcgaaa

SEQ ID NO: 229 - DNA, 273 bp, Unknown
  Description of Unknown: SNORD651 Bidirectional Promoter sequence
gatatcttttttttttgaagcgagttttaacaagatcagctgtttattcattccactatggggttgaagggatcattggccagctcaaggcttaccttctcttgggctgagatgctgctgccagctctaaaacagcactctgttctcaaaacctgggggaatggagaaggcgcatacaccttagagactgcagatgcagagcaggacaggcatttctgatgacagtcaattaatgactttacaaatttaagtccatcctaacaaaagcccctt

SEQ ID NO: 230 - DNA, 747 bp, Unknown
  Description of Unknown: SNORD652 Bidirectional Promoter sequence
gatatcttttttttttgaagcgagttttaacaagatcagctgtttattcattccactatggggttgaagggatcattggccagctcaaggcttaccttctcttgggctgagatgctgctgccagctctaaaacagcactctgttctcaaaacctgggggaatggagaaggcgcatacaccttagagactgcagatgcagagcaggacaggcatttctgatgacagtcaattaatgactttacaaatttaagtccatcctaacaaaagccccttaagacctaattagaggtaatttttctaagtttttgtaaattattgaggactacaaatcttaattagcttctcagtaggttgtaattttttttttttttttgagatggagtctcgctgttgcccaggctggagtgcagtggcacgatttcgactcactacaacctccgcctcccgggttcaagcgattctcctggctcagcccccaaagtagctgggattacaagtacacgccaccacacccggctaatttttgtatttttggtagagatggggtttcaccatgtcggccagccaggctggtcttgaactcctgacctcaggtgatccacccaccttagcctcccaaagtgctgggattacaggccactgtgcccagcctcaggggagttgtaatctccatttcagtcatatcaatttaaacttcacaaagctaagattacttttccttttcacatctgaggaaaactacatctc

SEQ ID NO: 231 - DNA, 127 bp, Unknown
  Description of Unknown: SPDYA1 Bidirectional Promoter sequence
agggaggggcggggttcgccggcgcgcactcccaggcaggccccgccccctcggccggctgtgcgcgctgattggcccctgccggcctcgcgctccctcgctccgggttggcgggagaccttagagc

SEQ ID NO: 232 - DNA, 241 bp, Unknown
  Description of Unknown: SPDYA2 Bidirectional Promoter sequence
agggaggggcggggttcgccggcgcgcactcccaggcaggccccgccccctcggccggctgtgcgcgctgattggcccctgccggcctcgcgctccctcgctccgggttggcgggagaccttagagcgggtaccgctgctggctagcgaccgacgagcaaccgtctgaggccaggagcgctgcgacggagccttgaccgccgttgcccggccctctcccgcgcagccccgggcttccgcag

SEQ ID NO: 233 - DNA, 233 bp, Unknown
  Description of Unknown: SRP Bidirectional Promoter sequence
ggtcggataccggcgcagaatagcactagaagctgtggtatggtgacgtcatcaactgggccagcccacaacgcctctaagatttcattttactcacccagcgaaacaacctgaccacactgcgcacgcgtttcctttgagcactgcattctgggtaaactgtctcaaaaatttgaagagcgcatgcgtgggccagcttcttccttttacctcgttgcactgctgagagcaag

SEQ ID NO: 234 - DNA, 557 bp, Unknown
  Description of Unknown: TAF151 Bidirectional Promoter sequence
ctcagggtcagattcgtgtacgatttcgttttaatgtacccttttcttccagcatccttgtttgctactcggcgagacagttacaacaaaccgggaagcgatcaggtacgcgagctggtcacgactcacagtcccagagctcgccgactccgaacgcccccaggtggcccaagcactctgcagcaaaagccgccagctaggacgtaccattcgaaattgtagggaaagaaaggctttgcataaccaaatactctgtgtttataaggtccctcctctttcgtttcctaaccgcaaattccatcacacccaataaagtgagaaataggattgtaaataagacggagcaagtaggttccacttcctccccgatcgtgatcgtggcattggtactttctcttctcaattccctctcaataatggtacggctagcggaggggggaatagagggccctgggaaggcctcagggctcggcggctagtaccagtgcagaaacatccctcctgccgcagctttgtggtaccacccgctgcccgctgattggctgccggggtcccgc

SEQ ID NO: 235 - DNA, 616 bp, Unknown
  Description of Unknown: TAF152 Bidirectional Promoter sequence
ctcagggtcagattcgtgtacgatttcgttttaatgtacccttttcttccagcatccttgtttgctactcggcgagacagttacaacaaaccgggaagcgatcaggtacgcgagctggtcacgactcacagtcccagagctcgccgactccgaacgcccccaggtggcccaagcactctgcagcaaaagccgccagctaggacgtaccattcgaaattgtagggaaagaaaggctttgcataaccaaatactctgtgtttataaggtccctcctctttcgtttcctaaccgcaaattccatcacacccaataaagtgagaaataggattgtaaataagacggagcaagtaggttccacttcctccccgatcgtgatcgtggcattggtactttctcttctcaattccctctcaataatggtacggctagcggaggggggaatagagggccctgggaaggcctcagggctcggcggctagtaccagtgcagaaacatccctcctgccgcagctttgtggtaccacccgctgcccgctgattggctgccggggtcccgcagtccgcctcagcccgccgcgccgccctcagtacagctccggccgccgcgccgcctggc

SEQ ID NO: 236 - DNA, 672 bp, Unknown
  Description of Unknown: TAF153 Bidirectional Promoter sequence
ctcagggtcagattcgtgtacgatttcgttttaatgtacccttttcttccagcatccttgtttgctactcggcgagacagttacaacaaaccgggaagcgatcaggtacgcgagctggtcacgactcacagtcccagagctcgccgactccgaacgcccccaggtggcccaagcactctgcagcaaaagccgccagctaggacgtaccattcgaaattgtagggaaagaaaggctttgcataaccaaatactctgtgtttataaggtccctcctctttcgtttcctaaccgcaaattccatcacacccaataaagtgagaaataggattgtaaataagacggagcaagtaggttccacttcctccccgatcgtgatcgtggcattggtactttctcttctcaattccctctcaataatggtacggctagcggaggggggaatagagggccctgggaaggcctcagggctcggcggctagtaccagtgcagaaacatccctcctgccgcagctttgtggtaccacccgctgcccgctgattggctgccggggtcccgcagtccgcctcagcccgccgcgccgccctcagtacagctccggccgccgcgccgcctggctttcgtattcgttgttctcggcgggctgtggggcctccgcgccgcggccgttagtc

SEQ ID NO: 237 - DNA, 166 bp, Unknown
  Description of Unknown: TBL31 Bidirectional Promoter sequence
cgaagcaccctcacagctcacggccctccctccaggccggaaacgtctccgcccgcttccgcttcccgatgcagccgccactgcccgaagcaaagatggcgccaagtgcgcggcgccggcggggacgtcacagtggtcgcgcgcggtgacgccatcgcagcgcgcc

SEQ ID NO: 238 - DNA, 268 bp, Unknown
  Description of Unknown: TBL32 Bidirectional Promoter sequence
cgaagcaccctcacagctcacggccctccctccaggccggaaacgtctccgcccgcttccgcttcccgatgcagccgccactgcccgaagcaaagatggcgccaagtgcgcggcgccggcggggacgtcacagtggtcgcgcgcggtgacgccatcgcagcgcgccgggagtgtggcgttctgtgaagagttcggtgctaacctccctcacgcggcggtggctgccgggaccctagcaggtttcagctggagcggcggcggcggcaac

SEQ ID NO: 239 - DNA, 298 bp, Unknown
  Description of Unknown: ZFY1 Bidirectional Promoter sequence
tttttttaaagccaacaaaggagacagtggggaatgctatatgtctgtatctgctttcctcctcaaccctaggaataaagtaaacacgtttactgagggcgggggtctaagggcctgcaacaatgagatctgtcgccttggctaggactggcgccgagaggcgataggtctcgggagagcctggcgcagggtgtgggagattaggaatcccaggtccaccggagatggcagggggtggcctggcccggtgcggggccgcttgcctgcacgcaaccaactaaggcggtggtgcgcaagt

SEQ ID NO: 240 - DNA, 704 bp, Unknown
  Description of Unknown: ZFY2 Bidirectional Promoter sequence
tttttttaaagccaacaaaggagacagtggggaatgctatatgtctgtatctgctttcctcctcaaccctaggaataaagtaaacacgtttactgagggcgggggtctaagggcctgcaacaatgagatctgtcgccttggctaggactggcgccgagaggcgataggtctcgggagagcctggcgcagggtgtgggagattaggaatcccaggtccaccggagatggcagggggtggcctggcccggtgcggggccgcttgcctgcacgcaaccaactaaggcggtggtgcgcaagtagtggtgacggcgggcgcgcggagaaaaggaacgttgtgacggaaactccagctgccggagaccccaccgcagtgaggtcactggactccccggactcggggcgtgaccggcgccgacccggggcgccgagaggcccaccgggcggagggggcccaactaccatcccgcattttcctgggtctctctcccgggcggtgacgtgacgtgctgacggcgggcccgtgccggggagctgggccgctttttgtcagctccgaactcggcccctcctccctccctccgcccgccctaccagccggagcccggcccagtgctccagagaaaggccgtcctgcagcacccgccgctgtcgccgaccgcccgcacatccgtcgggtgagtcccgcgtgcccccgcggccgcggg

SEQ ID NO: 241 - DNA, 233 bp, Unknown
  Description of Unknown: SRP-RPS29 sequence
cttgctctcagcagtgcaacgaggtaaaaggaagaagctggcccacgcatgcgctcttcaaatttttgagacagtttacccagaatgcagtgctcaaaggaaacgcgtgcgcagtgtggtcaggttgtttcgctgggtgagtaaaatgaaatcttagaggcgttgtgggctggcccagttgatgacgtcaccataccacagcttctagtgctattctgcgccggtatccgacc

SEQ ID NO: 242 - DNA, 239 bp, Unknown
  Description of Unknown: 7sk1 Bidirectional Promoter sequence
gaggtacccaagcggcgcacaagctatataaacctgaaggaagtctcaactttacacttaggtcaagttgcttatcgtactagagcttcagcaggaaatttaactaaaatctaatttaaccagcatagcaaatatcatttattcccaaaatgctaaagtttgagataaacggacttgatttccggctgttttgacactatccagaatgccttgcagatgggtggggcatgctaaatact

SEQ ID NO: 243 - DNA, 389 bp, Unknown
  Description of Unknown: 7Sk2 Bidirectional Promoter sequence
gaggtacccaagcggcgcacaagctatataaacctgaaggaagtctcaactttacacttaggtcaagttgcttatcgtactagagcttcagcaggaaatttaactaaaatctaatttaaccagcatagcaaatatcatttattcccaaaatgctaaagtttgagataaacggacttgatttccggctgttttgacactatccagaatgccttgcagatgggtggggcatgctaaatactgcagtctccattggtgaggtcgtcccggagcctcgcccagctcccgcgcgctagagccgcctgctggtctcacccagccgggaccgctgacctggcgctttgtgcggctccaggcctccgagtggactccagaaagcctgaaaagctatc

SEQ ID NO: 244 - DNA, 371 bp, Unknown
  Description of Unknown: 7sk3 Bidirectional Promoter sequence
gaggtacccaagcggcgcacaagctatataaacctgaaggaagtctcaactttacacttaggtcaagttgcttatcgtactagagcttcagcaggaaatttaactaaaatctaatttaaccagcatagcaaatatcatttattcccaaaatgctaaagtttgagataaacggacttgatttccggctgttttgacactatccagaatgccttgcagatgggtggggcatgctaaatactgcagtctccattggtgaggtcgtcccggagcctcgcccagctcccgcgcgctagagccgcctgctggtctcacccagccgggaccgctgacctggcgctttgtgcggctccaggcctccgagtggactccag

SEQ ID NO: 245 - DNA, 361 bp, Unknown
  Description of Unknown: RMRP-CCDC107 sequence
tgccggcccacgggtggagggatcgggcgggcggtgccgaagcggtccggcattggccggccgccccaacgcgcacgcgcacgcgagcaggccggccggctccggggaggccacgcccactccccgtagggcggggccagaccatatttgcataagatagtgtcattctagctttcctgtatttgttcatttcgtgtctattagctattctgctagccacaatgcctctgaaagcctatagtcttagaaagttatgcccgaaaacggtttttttaatctcacgccaccaactttctcaccctaatcataaaacacaatttctttagggctataaaatactactctgtgaagctgaggacgt

SEQ ID NO: 246 - DNA, 376 bp, Unknown
  Description of Unknown: ALOXE3 Bidirectional Promoter sequence
tcttcacgagagctttactttttgcttataagagggttctctataggaaaagccaggcttgtagaaccgacagaggattttatctgtgcagcatagaatattttggcacagatttggaagcagcgggtgaagctcgcctgctgctgattgagctttttctgcctcccgttcttagagcccccgccgaggctgcgacgcagggactgtaccatagtagaggctggaacagtgcggcgccggaaccggccgcgcggggccgctgcgggctatgggcttctctgagaggttcctccccagtccctagtggcccagatcccggacacctgggctcccgcccaggatcctgcaggcccagggcggtcctggagcggaaaga

SEQ ID NO: 247 - DNA, 308 bp, Unknown
  Description of Unknown: CGB1 Bidirectional Promoter sequence
ttgtcgggcccatcctttcttccctttgatcttacgcagggtgatggagccaatcacaagaggctcatccctgacgtcacccagtccccagggccagtgagggccctgcgttccgtggcgccccctggagggaggaaggggaactgcatctgagagagagcagccaattgggtccgctgactctggccaggttcccgtgccgcgtccaacacccctcactccctgtctcactcccccacggagactcaatttactttccatgtccacattcccagtgcttgcggaagatatcccgctaagagagagac

SEQ ID NO: 248 - DNA, 308 bp, Unknown
  Description of Unknown: CGB2 Bidirectional Promoter sequence
gtgtcggggatctcctttcttccttttgaccttacgcagggtgatggagccaatcaggagaggctcacccctgacgtcacccagtccccagggccagtgagggccctgcgttccgtggcgccccctggagggaggaaggggaactgtatctgagagagagcagccaattgggtccgctgactccggccgggttcccgtgccgcgtccaacacccctcactccctgtctcactcccccacggagactcaatttactttccatgtccacatccccagtgcttgcggaagatatcccgctaagagagagac

SEQ ID NO: 249 - DNA, 412 bp, Unknown
  Description of Unknown: Med16-1 Bidirectional Promoter sequence
gaatattgagttccaccaccagctatttaaagcccctggaacaaatgtctgtacacataggccgacttctcttaaatgacctagagatttaacctctatttatattagcccaatgtgtaatgcaactaacgtagttattgactggagttgagaaagtgctcgttgttctaccaaatatagctacggtggctgctgggaattactggaaatggtcgtatgcaaatagccccggaggcggggcagagcctgagccgcaccgccctcccagaagtctttgggaggcggccccacgcctcaggcgactggttgttaccgaggaagatggcggcgccagacccgaggcgctagggaagatcgcaccgcggacgcccgctgagcttggcgcacgggccaggagctggtgactgccctc

SEQ ID NO: 250 - DNA, 391 bp, Unknown
  Description of Unknown: Med16-2 Bidirectional Promoter sequence
gaatattgagttccaccaccagctatttaaagcccctggaacaaatgtctgtacacataggccgacttctcttaaatgacctagagatttaacctctatttatattagcccaatgtgtaatgcaactaacgtagttattgactggagttgagaaagtgctcgttgttctaccaaatatagctacggtggctgctgggaattactggaaatggtcgtatgcaaatagccccggaggcggggcagagcctgagccgcaccgccctcccagaagtctttgggaggcggccccacgcctcaggcgactggttgttaccgaggaagatggcggcgccagacccgaggcgctagggaagatcgcaccgcggacgcccgctgagcttggcgcacgggc

SEQ ID NO: 251 - DNA, 484 bp, Unknown
  Description of Unknown: DPP9-1 Bidirectional Promoter sequence
cctgataggtagcatcctctccggatatccttaatagtgggggatcatgggtttgactgagtgataccaagtcacaggggggtgtctctccctaacccaccggaagatgtcgttcatggggcgttacgcaccttaggccgccgcgccgcgggctcccccccaagcgccgcggacgccttggtacgtgcctggtggtgtccaatcccaggccgccgcctgggtcgctcaacttccgggtcaaaggtgcctgagccggcgggtcccctgtgtccgccgcggctgtcgtcccccgctcccgccacttccggggtcgcagtcccgggcatggagccgcgaccgtgaggcgccgctggacccgggacgacctgcccagtccggccgccgccccacgtcccggtctgtgtcccacgcctgcagctggaatggaggctctctggaccctttagaaggcacccctgccctcctgaggtcagctgagcggtta

SEQ ID NO: 252 - DNA, 449 bp, Unknown
  Description of Unknown: DPP9-2 Bidirectional Promoter sequence
cctgataggtagcatcctctccggatatccttaatagtgggggatcatgggtttgactgagtgataccaagtcacaggggggtgtctctccctaacccaccggaagatgtcgttcatggggcgttacgcaccttaggccgccgcgccgcgggctcccccccaagcgccgcggacgccttggtacgtgcctggtggtgtccaatcccaggccgccgcctgggtcgctcaacttccgggtcaaaggtgcctgagccggcgggtcccctgtgtccgccgcggctgtcgtcccccgctcccgccacttccggggtcgcagtcccgggcatggagccgcgaccgtgaggcgccgctggacccgggacgacctgcccagtccggccgccgccccacgtcccggtctgtgtcccacgcctgcagctggaatggaggctctctggaccctttagaag

SEQ ID NO: 253 - DNA, 396 bp, Unknown
  Description of Unknown: DPP9-3 Bidirectional Promoter sequence
cctgataggtagcatcctctccggatatccttaatagtgggggatcatgggtttgactgagtgataccaagtcacaggggggtgtctctccctaacccaccggaagatgtcgttcatggggcgttacgcaccttaggccgccgcgccgcgggctcccccccaagcgccgcggacgccttggtacgtgcctggtggtgtccaatcccaggccgccgcctgggtcgctcaacttccgggtcaaaggtgcctgagccggcgggtcccctgtgtccgccgcggctgtcgtcccccgctcccgccacttccggggtcgcagtcccgggcatggagccgcgaccgtgaggcgccgctggacccgggacgacctgcccagtccggccgccgccccacgtcccg

SEQ ID NO: 254 - DNA, 861 bp, Unknown
  Description of Unknown: SNORD13 C8orf41 sequence
tcctgactgcagcaccagaaggctggtctctcccacagaacgaggatggaggcggggagggatccgttgaagagggaaggagcgatcacccaaagagaactaaaatcaaataaaataaaacagagagatgtcttggaggagggggcgagtctgaccgggataagaataaagagaaagggtgaacccgggaggcggagtttgcagtgagccgagatcgcgccactgcactccagcctgggcgacagagtgagactccgtctcagtaaaaaaaaaaaaaaaaaaaagaataaagaggaaaggacgcaagaaagggaaaggggactctcagggagtaaaagagtcttacacttttaacagtgacgttaaaagactactgttgcctttctgaagactaaaaagaaaaaaaacttaaaaatttaaagaaataaacttctgagccatgtcaccaacttaaccacccccaggtacctgcaacggctcgcgcccgccggtgtctaacaggatccggacctagctcatattgctgccgcaaaacgcaaggctagcttccgccagtactgccgcaacaccttcttatttcacgacgtatggtcgtaaagcaataaagatccaggctcgggaaaatgacggagaggtggaactatagagaataaatttgcatatataataatccgctcgctaattgtgtttctgttttcctttgctaaggtagaaacaaaagaataatcacagaatctcagtgggactttgaaaatatccaggattttatacgtgaagaatggatgtatcgcattacggtagtcaccctatgtgtaaattagtggcacatacttggcactccttaatgtcaactataagatg

SEQ ID NO: 255 - DNA, 525 bp, Unknown
  Description of Unknown: THEM259 Bidirectional Promoter sequence
gactcaagggttactgtcacacctattttaagcccttcaatcaaatcatcttttggttaggataacttatggtcggtttcatatttagcataatttcctacagtggtatgttgcagaacaactttcgtgcttacgcttactttgatgtcttcgatcacgtaaaatcccatatcttatcgtaattttaccgccttatactggcctcatagccgcggtggattgtgggtgccaatatgcaaaagaggtggcccagatgcaggcccgccccctggagcggccgaggtagggggtgaggcctccgcgggcgccgctggcatcccagcgttctctgcgggcgcaggggggccgctcttgcccggcgtggcgactcgctagcgtcagcagcgccgcagccggacgagaaagcggaagatggcggcggcggccgggaggccgtgaggagagcggcggctgcgagggcggccgatggcggccgggaggcgccctcggacacttgcgggtcgttagggcgcgacgctgggaggc

SEQ ID NO: 256 - DNA, 9 bp, Artificial Sequence
  Description of Artificial Sequence: Synthetic oligonucleotide
gccgccacc

SEQ ID NO: 257 - DNA, 6 bp, Artificial Sequence
  Description of Artificial Sequence: Synthetic oligonucleotide
gccacc

SEQ ID NO: 258 - DNA, 49 bp, Artificial Sequence
  Description of Artificial Sequence: Synthetic oligonucleotide
aataaaatatctttattttcattacatctgtgtgttggttttttgtgtg

SEQ ID NO: 259 - DNA, 154 bp, Artificial Sequence
  Description of Artificial Sequence: Synthetic polynucleotide
aataaaatatctttattttcattacatctgtgtgttggttttttgtgtgaatcgatagtactaacatacgctctccatcaaaacaaaacgaaacaaaacaaactagcaaaataggctgtccccagtgcaagtgcaggtgccagaacatttctct

SEQ ID NO: 260 - DNA, 240 bp, Artificial Sequence
  Description of Artificial Sequence: Synthetic polynucleotide
atctagataactgatcataatcagccataccacatttgtagaggttttacttgctttaaaaaacctcccacacctccccctgaacctgaaacataaaatgaatgcaattgttgttgttaacttgtttattgcagcttataatggttacaaataaagcaatagcatcacaaatttcacaaataaagcatttttttcactgcattctagttgtggtttgtccaaactcatcaatgtatctta

SEQ ID NO: 261 - DNA, 120 bp, Artificial Sequence
  Description of Artificial Sequence: Synthetic polynucleotide
ttgtttattgcagcttataatggttacaaataaagcaatagcatcacaaatttcacaaataaagcatttttttcactgcattctagttgtggtttgtccaaactcatcaatgtatcttat

SEQ ID NO: 262 - DNA, 228 bp, Artificial Sequence
  Description of Artificial Sequence: Synthetic polynucleotide
cgactgtgccttctagttgccagccatctgttgtttgcccctcccccgtgccttccttgaccctggaaggtgccactcccactgtcctttcctaataaaatgaggaaattgcatcgcattgtctgagtaggtgtcattctattctggggggtggggtggggcaggacagcaagggggaggattgggaagacaatagcaggcatgctggggatgcggtgggctctatgg

SEQ ID NO: 263 - DNA, 271 bp, Artificial Sequence
  Description of Artificial Sequence: Synthetic polynucleotide
gggggaggctaactgaaacacggaaggagacaataccggaaggaacccgcgctatgacggcaataaaaagacagaataaaacgcacgggtgttgggtcgtttgttcataaacgcggggttcggtcccagggctggcactctgtcgataccccaccgagaccccattggggccaatacgcccgcgtttcttccttttccccaccccaccccccaagttcgggtgaaggcccagggctcgcagccaacgtcggggcggcaggccctgccatag

SEQ ID NO: 264 - DNA, 32 bp, Artificial Sequence
  Description of Artificial Sequence: Synthetic oligonucleotide
ggtatcaaataaaatacgaaatgtgacagatt

SEQ ID NO: 265 - DNA, 26 bp, Artificial Sequence
  Description of Artificial Sequence: Synthetic oligonucleotide
aaataaaatacgaaatgtgacagatt

SEQ ID NO: 266 - DNA, 100 bp, Artificial Sequence
  Description of Artificial Sequence: Synthetic polynucleotide
ggttgctgatttctccacagcttgcatttctgaaccaaaggcccttttcagggccgcccaactaaacaaaagaagagctgtatccattaagtcaagaagc

SEQ ID NO: 267 - DNA, 174 bp, Artificial Sequence
  Description of Artificial Sequence: Synthetic polynucleotide
gattcgtcagtagggttgtaaaggtttttcttttcctgagaaaacaaccttttgttttctcaggttttgctttttggcctttccctagctttaaaaaaaaaaaagcaaaagacgctggtggctggcactcctggtttccaggacggggttcaagtccctgcggtgtctttgctt

SEQ ID NO: 268 - DNA, 123 bp, Artificial Sequence
  Description of Artificial Sequence: Synthetic polynucleotide
aaaggtttttcttttcctgagaaatttctcaggttttgctttttaaaaaaaaagcaaaagacgctggtggctggcactcctggtttccaggacggggttcaagtccctgcggtgtctttgctt

SEQ ID NO: 269 - DNA, 242 bp, Ovis aries
tgagcttccctccgccctacggcgaacaatgcgcgcaaacagcatttataatgagctcatacctaaagccactttacggttacggtgacttcccacaagacattgcggcatgcaaatattttagtgcgtcccgcccctggtagttccacgctagtacgcacacgcactacggttcccgcctttagactgcgctggcgattccaggagcggactgatgacgtcagcgttggggctccatggcg

SEQ ID NO: 270 - DNA, 242 bp, Ovis orientalis; identical to SEQ ID NO: 269

SEQ ID NO: 271 - DNA, 242 bp, Ovis aries
tgagcttccctccgccctacggcgaacgatgcgcgcaaacagcatttataatgagctcatacctaaagccactttacggttacggtgacttcccacaagacattgcggcatgcaaatattttagtgcgtcccgcccctggtagttccacgctagtacgcacacgcactacggttcccgcctttagactgcgctggcgattccaggagcggactgatgacgtcagcgttggggctccatggcg

SEQ ID NO: 272 - DNA, 242 bp, Ovis aries
tgagcttccctccgccctacggcgaacgatgcgcgcaaacagcatttataatgagctcatacctaaagccactttacggttacggtgacttcccacaagacattgcggcatgcaaatattttagtgcgtcccgcccctggtagttccacgctaggacgcacacgcactacggttcccgcctttagactgcgctggcgattccaggagcggactgatgacgtcagcgttggggctccatggcg

SEQ ID NO: 273 - DNA, 241 bp, Ovis ammon
tgagcttccctccgccctacgacgaacaatgcgcgcaaacagcatttataatgagctcatacctaaagccactttacggttacggtgacttcccacaagacattgcggcatgcaaatattttagtgcgtcccgcccctggtagttccacgctaggacgcacacgcactacggttcccgcctttagactgcgctggcgattccaggagcggactgatgacgtcagcgttggggctccatggc

SEQ ID NO: 274 - DNA, 241 bp, Ovis ammon; identical to SEQ ID NO: 273

SEQ ID NO: 275 - DNA, 241 bp, Ovis aries
tgagcttccctccgccctacggcgaacaatgcgcgcaaacagcatttataatgagctcatacctaaagccactttacggttacggtgacttcccacaagacattgcggcatgcaaatattttagtgcgtcccgcccctggtagttccacgctaggacgcacacgcactacggttcccgcctttagactgcgctggcgattccaggagcggactgatgacgtcagcgttggggctccatggc

SEQ ID NO: 276 - DNA, 241 bp, Ovis aries
tgagcttccctccgccctacggcgaacaacgcgcgcaaacagcatttataatgagctcatacctaaagccactttacggttacggtgacttcccacaagacattgcggcatgcaaatattttagtgcgtcccgcccctggtagttccacgctaggacgcacacgcactacggttcccgcctttagactgcgctggcgattccaggagcggactgatgacgtcagcgttggggctccatggc

SEQ ID NO: 277 - DNA, 241 bp, Ovis nivicola
tgagcttccctccgccctacggcgaacaacgcgcgcaaacagcatttataatgagctcacacctaaagccactttacggttacggtgacttcccacaagacattgcggcatgcaaatattttagtgcgtcccgcccctggcagttccacgctaggacgcacacgcactacggttcccgcctttagactgcgctggcgattccaggagcggactgatgacgtcagcgttggggctccatggc

SEQ ID NO: 278 - DNA, 241 bp, Hemitragus hylocrius
tgagcttccctccgccctacggcaaacaatgcgcgcaagcagcatttataatgagctcatacctaaagccactttacggttacggtgacttcccacaagacattgcggcatgcaaatattttagtgcgtcccgcccctggtagttccacgctaggacgcacacgcactacggttcccgcctttagactgcgctggcgattccaggagcggactgatgacgtcagcgttggggctccatggc

SEQ ID NO: 279 - DNA, 241 bp, Ovis canadensis
tgagcttccctccgccctacggcgaacaacgcgcgcaaacagcatttataatgagctcatacctaaagccactttacggttacggtgacttcccacaagacattgcggcatgcaaatattttagtgcgtcccgcccctggtagttccacgccaggacgcacacgcactacggttcccgcctttagactgcgctggcgattccaggagcggactgatgacgtcagcgttggggctcgatggc

SEQ ID NO: 280 - DNA, 242 bp, Capra hircus
tgagcttccctccgccctacggcaaacaacgcgcgcaaacagcatttataatgagctcatacctaaagccactttacgattacggtgacttcccacaagacattgcggcatgcaaatattttagtgcgtcccgcccctggtagttccacgctaggacgcacacgcactacggttcccgcctttagactgcgctggcgattccagcgagcggactgatgacgtcagcgttggggctccatggc

SEQ ID NO: 281 - DNA, 242 bp, Capra aegagrus; identical to SEQ ID NO: 280

SEQ ID NO: 282 - DNA, 242 bp, Capra hircus
tgagcttccctccgccctacggcaaacaacgcgcgcaaacagcatttataatgagctcatacctaaagccactttacggttacggtgacttcccacaagacattgcggcatgcaaatattttagtgcgtcccgcccctggtagttccacgctaggacgcacacgcactacggttcccgcctttagactgcgctggcgattccagcgagcggactgatgacgtcagcgttggggctccatggc

SEQ ID NO: 283 - DNA, 242 bp, Capra aegagrus
tgagcttccctccgccctacggcaaacaacgcgcgcaaacagcatttataatgagctcatacctaaagccactttacgattacggtgacttcccacaagacattgcggcatgcaaatattttagtgcgtcccgcccctggtagttccacgctaggacgcacacgcactacggttcccgcctttagactgcgctggcgattccagcgagccgactgatgacgtcagcgttggggctccatggc

SEQ ID NO: 284 - DNA, 242 bp, Pseudois nayaur
tgagcttccctccgccctacggcaaataacgcgcgcaaacagcatttataatgagctcatacctaaagccactttacggttacggtgacttcccacaagacattgcggcatgcaaatattttagtgcgtcccgcccctggtagttccacgctaggacgcacacgcactacggttcccgcctttagattgcgctggcgattccagcgagcggactgatgacgtcagcgttggggctccatggc

SEQ ID NO: 285 - DNA, 242 bp, Capra sibirica
tgagcttccctccgccctacggcaaacaacgcgcgcaaacagcatttataatgagctcatacctaaagccactttacggttacggtgacttcccacaagacattgcggcatgcaaatattttagtgcgtcccgcccctggtagttcgacgctaggacgcacacgcactacggttcccgcctttagactgcgctggcgattccagcgagcggactgatgacgtcagcgttggggctccatggc

SEQ ID NO: 286 - DNA, 242 bp, Capra hircus
tgagcttccctccgccctacggcgaacaacgcgcgcaaacagcatttataatgcgctcatacctaaagccacttttcgattacggtgacttcccacaagacattgcggcatgcaaatattttagtgcgtcccgcccctggtagttccacgctaggacgcacacgcactacggttcccgcctttagactgcgctggcgattccagcgagcggactgatgacgtcagcgttggggctccatggc

SEQ ID NO: 287 - DNA, 242 bp, Capra hircus; identical to SEQ ID NO: 286

SEQ ID NO: 288 - DNA, 242 bp, Capra hircus
tgagcttccctccgccctacggcgaacaacgcgtccaaacagcatttataatgcgctcatacctaaagccacttttcggttacggtgacttcccacaagacattgcggcatgcaaatattttagtgcgtcccgcccctggtagttccacgctaggacgcacacgcactacggttcccgcctttagactgcgctggcgattccagcgagcggactgatgacgtcagcgttggggctccatggc

SEQ ID NO: 289 - DNA, 242 bp, Ammotragus lervia
tgagcttccctccgccctacagcaaataacgagcgcaaacagcatttataatgagctcatacctaaagccactttacggttacggtgacttcccacaagacattgcggcatgcaaatattttagtgcgtcccgcccctggtagttccacgctaggacgcacacgcactacggttcccgcctttagactgcgctggcgattcccgcgagcggactgatgacgtcagcgtgggggctccatggc

SEQ ID NO: 290 - DNA, 242 bp, Kobus ellipsiprymnus
tgagcttccctccgccctacggccaacaccgcgcgcaaacagcgtttataatgcgctcacacctaaagccactttacggttacggtgactccccacaagacactgcgacatgcaaatattttagtgcatcccgcccctggtagtcccacgctgggacgcacacgcacgacggttcccgcctttagactgcgctggcgattccggggagcgggctgatgacgtcagcgttcgggctccatggc

SEQ ID NO: 291 - DNA, 242 bp, Redunca redunca
tgagcttccctccgccctacggcaaacaccgcgcgcaaacagcatttataatgcgctcatacctaaagccactttacggttacggtgacttcccacaagacattgcgacatgcaaatattttagtgcatcccgcccctggtagttccacgctgggacgcacacgcactacggttcccgcctttagactgcgctggcgattccagggagcgggctgatgacgtcagcgttcgggctccatggc

SEQ ID NO: 292 - DNA, 242 bp, Antidorcas marsupialis
tgagcttccctccgccctacggcgaacaacacgggcaagcagcatttataatgagctcatacctaaagcaacataacggttacggtgacttcccacaagacattgcgacatgcaaatattttagtgtaccccgcccctggtagttccacgctaggacgcacacgcactccggttcccgcctttagactgcgctggcgattccagggagcgggctgatgacgtcagtgttcgggctccatggc

SEQ ID NO: 293 - DNA, 242 bp, Litocranius walleri
tgagcttccctccgccctacggcgaacaatgcgcgcaaacagcatttataatgcgctcatacttaaagcaactttacggttacggtgacttcccacaagacattgcgacatgcaaatattttagtgtatcccgcccctggtagttccacgctaggacgcacacgcactccggttcccgcctttagactgcgctggcgattccagggagcggactgatgacgtcagtgatcgggctccatggc

SEQ ID NO: 294 - DNA, 241 bp, Madoqua kirkii
tgagcttccctccgccctacggccaacagtcgcacaaacagcatttataatgagctcatacctacagcaactttacggttacggtgacttcccacaagacattgcgacatgcaaatattttagtgtattccgcccctggtagttccacgctaggacgcacacgcactgcggttcccgcctttagactgcgctggcgattccagggagcggactgatgacgtcagtgttcgggctccatggc

SEQ ID NO: 295 - DNA, 242 bp, Raphicerus campestris
tgagcttccctccgccctatggccaatagctcgcgcaaacagcatttataatgagctcatacctaaagcaactttacggttacggtgacttcccacaagacattgcgacatgcaaatattttagtatatcccgcccctggtagttccacgctaggacgcacacgcactgcggttcccgcctttagactgcgctggcgattccagggagcggactgatgacgtcagtgttcgggctccatggc

SEQ ID NO: 296 - DNA, 242 bp, Oryx gazella
tgagcttccctccgccctacggcaaacaatgcgagcaaacagcatttataatgagctcatacctaaagccacttttcggttacggtgacttcccacaagacattgcgatatgtaaatattttagtgcatcccgcccctggtagttccacgctaggacgcacacgcactacggttcccgcctttagattgcgctggcgattccagggagcggactgatgacgccagcgttcggactccatggc

SEQ ID NO: 297 - DNA, 242 bp, Oryx gazella; identical to SEQ ID NO: 296

SEQ ID NO: 298 - DNA, 242 bp, Oryx dammah; identical to SEQ ID NO: 296

SEQ ID NO: 299 - DNA, 240 bp, Hippotragus niger
tgagcttccctccgccctatggcaaacaatgcgcaaacagcatttataatgagctcatacctaaagccactttacggttacggtgacttcccacaagacattgcgatatgtaaatattttagtgcatcccgcccctggtagttccacgctaggacgcacacgcactacggttcccgcctttagattgcgctggcgattccagggagcggactgatgacgtcagcgttcgggctccatggc

SEQ ID NO: 300 - DNA, 242 bp, Nanger granti
tgagcttccctccgccctacggcaaacaacgcgcgcaaacagcatttataatgagctcatacctaaagcaacttttcggttacggtgacttcccacaagccattgcgacatgcaaatgtcttagtatatcccgcccctggtagttccacgctaggacgcacacgcactccggttcccgcctttagactgcgccggcgattccggggagcgggctgatgacgtcagtgttcgggctccatggc

SEQ ID NO: 301 - DNA, 242 bp, Eudorcas thomsonii
tgagcttccctccgccctacggcaaataacgcgcgcaaacagcatttataatgagctcatacctaaagcaatttttcggttacggtgacttcccacaagccattgcgacatgcaaatattttagtgtatcccgcccctggtaggtccacgctaggacgcacgcgcactccggttcccgcctttagacggcgctggcgattccggggagcgggctgatgacgtcagtgttcgggctccatggc

SEQ ID NO: 302 - DNA, 241 bp, Kobus leche
tgagcttccctccgccctacgcaaataccacgcgcaaacagcatttataaggcgctcaaacctaaagccactttacggttacggtgacttcccacaagacattgcgacatgcaaatatcttagtgcatcccgcccctggtagttccacgctgggacgcacacgcaccacggttcccgcctttagactgcactggcgattccagggagcgggctgatgacgtcagcgttcgggctccatggc

SEQ ID NO: 303 - DNA, 241 bp, Oreamnos americanus
gagcttccctccgccctacggcaaacaatgcgcgcaaaaagcatttataatgagctcatacctaaagccactttacggttacggtgacttcccacaagacattgcggcatgcaaatattttagtgcatcccgcccctagtagttccacgctaggacgcacacgcactacggttcccgcctttagactgcgctgccgattccaacgagcggactgatgacgtcagcgtttgggctccatggc

SEQ ID NO: 304 - DNA, 242 bp, Beatragus hunteri
tgagcttccctccgccctacggcagacaatgcgtgcgcacagcacttataatgcgctcacacctaaagccacttttcagttacggtgacttcccacaagacattgcgatatgcaaatattttagcgcatcccgcccctggtagttccacgcgaggacgcacacgcactacggttcccgcctttagacttcgctggcgattccagggagcggcctgatgacgtcagcgttcgggctccatggc

SEQ ID NO: 305 - DNA, 242 bp, Damaliscus lunatus
tgagcttccctccgccctacggcaaacaatgcgtgcacacagcacttataatgcgctcacacctaaagccacttttcagttacggtgacttcccacaagacattgcgatatgcaaatattttagcgcgtcccgcccctggtagttccacgcgaggacgcacacgcactacggttcccgcctttagactgcgctggcgattccagggagcggcctgatgacgtcagcgttcgggctccatggc

SEQ ID NO: 306 - DNA, 242 bp, Damaliscus lunatus
tgagcttccctccgccctacggcaaacaatgcgtgcacacagcacttataatgcgctcacacctaaagccacttttcagttacggtgacttcccacaagacattgcgatatgcaaatattttagcgcatcccgcccctggtagttccacgcgaagacgcacacgcactacggttcccgcctttagactgcgctggcgattccagggagcggcctgatgacgtcagcgctcgggctccatggc

SEQ ID NO: 307 - DNA, 242 bp, Connochaetes taurinus
tgagcttccctccgccctacggcagacaatgcgtgcacagagcatttataatgcgctcacacctaaagccacttttcagttacggtgacttcccacaagacattgcgatatgcaaatattttagcgcgtcccgcccctggtagttccacgcgaggacgcacacgcactacggttcccgcctttagactgcgctggcgattccagggagcggcctgatgacgtcagcgttcgggctccatggc

SEQ ID NO: 308 - DNA, 242 bp, Aepyceros melampus
tgagcttccctccgccctacgccaaactgtgcgcccaaacagcgtttataatgcgctcatacctaaagctacttttcggttacggtgacttcccacaagacattgcgacatgcaaatattttagtgcgtcccgcccctggtagttccatgctaggacgcacacgcactacggttcccgcctttagactgcgctggcgattcctgggagcgggctgatgacgtcagcgctcgggctccatggc

SEQ ID NO: 309 - DNA, 242 bp, Pantholops hodgsonii
tgagcttccctccgccctacggcaaacgactcccgcaaacagcatttataatgcgctcatacataaagccacttttcggttacggtgacttcccacaagacattgcgacatgcaaatattttagtgcatcccgcccctggtagctccacgctaggacgcacacgcactacggttcccgcctttagactgccggggcgattccagggagcggactgatgacgtcagcgttcggactccatggc

SEQ ID NO: 310 - DNA, 242 bp, Neotragus moschatus
tgagcttccctccgccctacggcaaacagtgcccacaaacagcatttataatgagctcatacctaaagccacttttcggttacggtgacttcccacaagacattgcaatatgcaaatattttagtgcgtccggcccctggtagttccacgctaggacgcacacgcactacagttccggcctttagactcctctggcgattcctgggagcggactgatgacgtcagcgttcgggctccatggc

SEQ ID NO: 311 - DNA, 237 bp, Ourebia ourebi
tgagcttccctccgccctgtgacaaacaacgcccgcaaacagcatttataacgagctcatacctaaagcaactttacggttacggtgacttcccacaagacattgcgacatgcaaatattttaatgtatcccgcccctagtagtttcacgctaggacgcacacgcactacggttcccgcctttagactgcgctggcgattccagggagcggactgatgacgtcagtgttcgggctcc

SEQ ID NO: 312 - DNA, 242 bp, Saiga tatarica
tgagcttccctccgccctacggcgaacaacgcgcgcaaacagcgtttataatgagctcatacctaaagcaactttacggttacggtgacttcccacaagccattgcgacatgcaaatattttggtgtatcccgcccctggtagttccacgctagggcggacacgccccgcggtccccgcctttagcctgcgctggcgattccagggagcgggctgatgacgtcagcgcccgggctccatggc

SEQ ID NO: 313 - DNA, 242 bp, Bubalus bubalis
tgagcttccctccgccctatggcaagcgagtcgcgcaaacagcatttataatggctcatacctagagccacttttcggttacggtgacttctcacaagacattgggacatgcaaatattacagtgcgtcccgcccctggttagttctacgctaggacgcacacgcactacggttcccgcctttagactgcgctggcggttcctgggagcggactgatgacgtcagtgttcgggatccatggc

SEQ ID NO: 314 - DNA, 242 bp, Bubalus bubalis; identical to SEQ ID NO: 313

SEQ ID NO: 315 - DNA, 242 bp, Bubalus bubalis; identical to SEQ ID NO: 313

SEQ ID NO: 316 - DNA, 242 bp, Bubalus bubalis; identical to SEQ ID NO: 313

SEQ ID NO: 317 - DNA, 242 bp, Bubalus bubalis; identical to SEQ ID NO: 313

SEQ ID NO: 318 - DNA, 242 bp, Syncerus caffer
tgagcttccctccgccctatagcaaacaatccgggcaaacagcatttataatgcgctcatacctagagccacttttcggttatggtgacttctcacaagacattgggacatgcaaatattacagcgcgtcccgcccctggtagttctacgctaggacgcacacgcactacggttcccgcctttagactgcgctggcggttcctgggagcggactgatgacgtcagtgttcgggatccatggc

SEQ ID NO: 319 - DNA, 242 bp, Syncerus caffer
tgagcttccctccgccctatagcaaacaatccgggcaaacagcatttataatgcgctcatacctagagccacttttcggttatggtgacttctcacaagacattgggacatgcaaatattacagtgcgtcccgcccctggtagttctacgctaggacgcacacgcactacggttcccgcctttagactgcgctggcggttcctgggagcggactgatgacgtcagtgttcgggatccatggc

SEQ ID NO: 320 - DNA, 242 bp, Syncerus caffer; identical to SEQ ID NO: 319

SEQ ID NO: 321 - DNA, 243 bp, Bos indicus
tgagcttccctccgccctacggcaaacaccgcacgcaaatagcacttataatgtgctcatacctagagccacttttcggttacggtgacttctcaaaaagacagtgggacatgcaaatattacagtgcgtcccgcccctggtaggtctacgctaggacgcacgcgcactacggttcccgcctatagactgcgctggcgattcctgggagcggactgatgacgtcagcgttcgggatccatggc

SEQ ID NO: 322 - DNA, 243 bp, Bos sp.; identical to SEQ ID NO: 321

SEQ ID NO: 323 - DNA, 243 bp, Bos sp.; identical to SEQ ID NO: 321

SEQ ID NO: 324 - DNA, 243 bp, Bos sp.; identical to SEQ ID NO: 321

SEQ ID NO: 325 - DNA, 243 bp, Bos sp.; identical to SEQ ID NO: 321

SEQ ID NO: 326 - DNA, 243 bp, Bos indicus
tgagcttccctccgccctacggcaaacaccgcacgcaaatagcacttataatgtgctcatacctagagccacttttcggttacggtgacttctcaaaaagacagtggracatgcaaatattacagtgcgtcccgcccctggtaggtctacgctaggacgcacgcgcactacggttcccgcctatagactgcgctggcgattcctgggagcggactgatgacgtcagcgttcgggatccatggc

SEQ ID NO: 327 - DNA, 243 bp, Bos sp.
tgagcttccctccgccctacggcaaacaccgcacgcaaatagcacttataatgtgctcatacctagagccacttttcggttacggtgacttctcaaaaagacagtggaacatgcaaatattacagtgcgtcccgcccctggtaggtctacgctaggacgcacgcgcactacggttcccgcctatagactgcgctggcgattcctgggagcggactgatgacgtcagcgttcgggatccatggc

SEQ ID NO: 328 - DNA, 243 bp, Bos sp.; identical to SEQ ID NO: 327

SEQ ID NO: 329 - DNA, 243 bp, Bos sp.; identical to SEQ ID NO: 327

SEQ ID NO: 330 - DNA, 243 bp, Bos sp.; identical to SEQ ID NO: 327

SEQ ID NO: 331 - DNA, 243 bp, Bos sp.; identical to SEQ ID NO: 327

SEQ ID NO: 332 - DNA, 243 bp, Bos taurus; identical to SEQ ID NO: 327

SEQ ID NO: 333 - DNA, 243 bp, Bos taurus; identical to SEQ ID NO: 327

SEQ ID NO: 334 - DNA, 244 bp, Bos taurus
tgagcttccctccgccctacggcaaacaccgcacgcaaatagcacttataatgtgctcatacctagagccacttttcggttacggtgacttctcaaaaagacagtgggaacatgcaaatattacagtgcgtcccgcccctggtaggtctacgctaggacgcacgcgcactacggttcccgcctatagactgcgctggcgattcctgggagcggactgatgacgtcagcgttcgggatccatggc

SEQ ID NO: 335 - DNA, 242 bp, Bos mutus
tgagcttccctccgccctatgccaaacaccgcccgcaaatagcatttataatgtgctcatacctagagccacttttcgattacggtgacttctcaaaagacagtgggacatgcaaatattacagtgcgtcccgcccctggtaggtctacgctaggacgcacgcgcactacggttcccgcctatagactgcgctggcgattcctgggagcggactgatgacgtcagcgttcgggatccatggc

SEQ ID NO: 336 - DNA, 242 bp, Bos sp.
tgagcttccctccgccctataccaaacaccgcccgcaaatagcatttataatgtgctcatacctagagccacttttcgattacggtgacttctcaaaagacagtgggacatgcaaatattacagtgcgtcccgcccctggtaggtctacgctaggacgcacgcgcactacggttcccgcctatagactgcgctggcgattcctgggagcggactgatgacgtcagcgttcgggatccatggc

SEQ ID NO: 337 - DNA, 242 bp, Bos mutus
tgagcttccctccgccctatgccaaacaccgcccgcaaatagtatttataatgtgctcatacctagagccacttttcgattacggtgacttctcaaaagacagtgggacatgcaaatattacagtgcgtcccgcccctggtaggtctacgctaggacgcacgcgcactacggttcccgcctatagactgcgctggcgattcctgggagcggactgatgacgtcagcgttcgggatccatggc

SEQ ID NO: 338 - DNA, 242 bp, Bison bison
tgagcttccctccgccctatggcaaacaccgcacgcaaatagcatttataatgtgctcatacctagagccacttttcggttacggtgacttctcaaaagacagtgggacatgcaaatattacagtgcgtcccgcccctggtaggtctacgctaggacgcacgcgcactacggttcccgcctatagactgcgctggcgattcctgggagcggactgatgacgtcagcgttcgggatccatggc

SEQ ID NO: 339 - DNA, 242 bp, Bos frontalis
tgagcttccctccgccctatggcaactaaggcccgcaaacagcatttataatgtgctcatacctagagtcacttttcggttacggtgacttctcacaagagactgggacatgcaaatattacagtgcgtcccgcccctggtagttctacgctaggacgcacgcgcactacggttcccgcctatagactgcgctggcgattcctgggagcggactgatgacgtcagcattcgagatccatggc

SEQ ID NO: 340 - DNA, 242 bp, Bos gaurus
tgagcttccctccgccctatggcaactaaggcgcgcaaacagcatttataatgtgctcatacctagagtcacttttcggttacggtgacttctcacaagagactgggacatgcaaatattacagtgcgtcccgcccctggtagttctacgctaggacgcacgcgcactacggttcccgcctatagactgcgctggcgattcctgggagcggactgatgacgtcagcattcgagatccatggc

SEQ ID NO: 341 - DNA, 241 bp, Tragelaphus scriptus
tgagcttccctccgccctatgccaaacacgcgcgcaaacagcatttataatgcactcataagtagagccacttttcggttatggtgacttctcacaaggaattggaacatgcaaatattacagtgcgtcccgcccctagtagttctgcgctaggacgcagacgcactacggttcccgcctttagaccgcgctggcgattcctgggagcggactgatgacgtcagcgttcgggatccatggc

SEQ ID NO: 342 - DNA, 241 bp, Tragelaphus buxtoni
tgagcttccctccgccctatgccaaacacgcgcgcaaacagcatttataatgcactcataagtagagccacttttcggttatggtgacttctcacaaggaattgggacatgcaaatattgcagtgcgtcccgcccctggtagttctgcgctaggacgcagacgcactacggttcccgcctttagactgcgctggcgattcctgggagcggactgatgacgtcagcgttcgggatctatggc

SEQ ID NO: 343 - DNA, 241 bp, Tragelaphus oryx
tgagcttccctccgccctacgccaattctgcgcgcaaacagcatttataatgcactcataagtagagccacttttcggttatggtgacttctcacaaggaattgggacatgcaaatattacagtgcgtcccgcccctggtagttctgcgctaggacgcagacgcactgcggttcccgcctttagactgcgctggcgattcctgggagcggactgatgacgtcagcgttcgggatccatggc

SEQ ID NO: 344 - DNA, 238 bp, Tragelaphus strepsiceros
tgagcttccctccgccctatgccaaacgcgcgaaacagcatttataatgcactcataagtagagccacttttcgattatggtgacttctcacaaggaattgggacatgcaaatattacagtgcgtcccgcccctggtagttctgtgctaggacgcagacgcagtacggttcccgcctttagactgcgctggcgattcctgggagcggactgatgacgtcagcgttcgggatccatggc

SEQ ID NO: 345 - DNA, 241 bp, Cephalophus harveyi
tgagcttccctccgccctatgccaaacaacgcgcgcaaacagcatttataatgcactcataagtagagccactttcggttatggtgacttctcacaaggaattgggacatgcaaatattacagtgcgtcccgcccctggtagttctgcgctaggacgcagacgcactacggttcccgcctttagaccgcgctggcgattcctgggagcggactgatgacgtcagcgttcgggatccatggc

SEQ ID NO: 346 - DNA, 241 bp, Tragelaphus imberbis
tgagcttccctccgccctatgccaaacaacgcgcgcaaacagcatttataatgcactcataagtagagccactttcggttatggtgacttctcacaaggaattgggacatgcaaatattacagtgcgtcccgcccctggtagttctgcgcaaggacgcagacgcactacggttcccgcctttagactgcgctggcgattcttgggagcggactgatgacgtcagcgttcgggatccatggc

SEQ ID NO: 347 - DNA, 238 bp, Tragelaphus eurycerus
tgagcttccctccgccctatgccaaacaacgctcgcaaacagcatttataatgcactcataagtagagccacttttcggttatggtgacttctcacaaggaattgggacatgcaaatattacagtgcgtcccgcccctggtagttctacggacgcagacgcactacggttcccgcctttagattgcgctggcgattcctgggagcggactgatgacgtcagcgttcgggatccatggc

SEQ ID NO: 348 - DNA, 238 bp, Tragelaphus spekii
tgagcttccctccgccctatgccaaacaacgcgcgtaaacagcatttataatgcactcataagtagagccacttttcggttatggtgacttctcacaaggaattgggacatgcaaatattacagtgcgtcccgcccctggtagttctacggacgcagacgcactacggttcccgcctttagactgcgctggcgattcctgggagcggactgatgacgtcagcgttcgggatccatggc

SEQ ID NO: 349 - DNA, 242 bp, Giraffa tippelskirchi
tgagcttccctccgccctatagcaaacagcgcgcacaaccagcatttataatgcgctcgtacctaaaggcacttgtcggttacggtgacttcccataagacattgcgacatgcaaatactatagtgcgtcccgcccctggtagttccacgctgggacgcacacacagtacggttcccgcctttagactgcgctggcgattcctgggagaggattgatgacgtcagcgctcgggctccatggc

SEQ ID NO: 350 - DNA, 242 bp, Giraffa camelopardalis; identical to SEQ ID NO: 349

SEQ ID NO: 351 - DNA, 242 bp, Giraffa tippelskirchi; identical to SEQ ID NO: 349

SEQ ID NO: 352 - DNA, 241 bp, Okapia johnstoni
tgagcttccctccgccctatggcaaatactgcgcgcaaccagcgtttataatgcgctcgtacctaaaggcacttatcggttacggtgacttcccacaagacattgcgacatgcaaatactacatgcgtcccgcccctggcagttccacgctgggacgcacacgcagtacggttcccgcctttagactgcactggcgattcctgggagaggattgatgacgtcagcgttcgggctccatggc

SEQ ID NO: 353 - DNA, 241 bp, Sylvicapra grimmia
tgagcttccctccgccctatagcacaaaacgcgggcaaacagcatttataatgcgctcatgcctaaagccactttacggttacggtgacttcccacaagacattgcgacatgcaaatattttagtgcgtcccgccctggtagttccacgctaggacacacacgcactatgcttccggcctttagactgcgccggtgattccaaggagcggactgatgacgtcagcgttccggctccatggc

SEQ ID NO: 354 - DNA, 242 bp, Cephalophus harveyi
tgagcttccctccgccctacggcctagagagcgggcaaacagcatttataatgagctcatacctaaaggcactctacggttacggtgacttcccacaagacattgcgacatgcaaatattttagtgcgtcccgcccctggtagttccacgctaggacacacacgcactatgcttccggcctttagactgcgccagtgattccagggagcggactgatgacgtcagcgttccggctccatggc

SEQ ID NO: 355 - DNA, 242 bp, Philantomba maxwellii
tgagcttccctccgccctacgccagaaagcgtaggcaaacagcattaataacgagctgatacctaaagtcactttacggttacggtgacttcccacaagacattgcgacatgcaaatatttcagtgcgtcccgcccctggtagttccccgctaggacacaaacgcactgtggttccgacctttagactgcgccggtgattccagggagcggactgatgacgtcagcgttcgggctccatggc

SEQ ID NO: 356 - DNA, 242 bp, Neotragus pygmaeus
tgagcttccctccgccctatggcaagcaaccctcgcaaacagcgtttataatgcgctcatacctaaactgactttacggttacggtgacttcccacaagacattgcgacatgcaaatattttagtgcgtcccgcccctgatagttccaagctagaacccacacgcactgaggttcccgcccttagactgcgctggcgattccagggagcggactgatgacgtaagcgttcgggcgccatggc

SEQ ID NO: 357 - DNA, 242 bp, Capreolus capreolus
tgagcttcccgccgccccgtggcgagtaacacgcgcaaagagcatttataacgcgctcagacctaaagccacttgtcgcttacggtgacttcccataagacattgcaatatgcaaatactccagtgcgtcccgcccctggcagttccacgctgggacgtgcacgcactacggttcccgcctttagactgcgctcgcgattcccgggagagggctgatgacgtcagcgttcgggctccatggc

SEQ ID NO: 358 - DNA, 242 bp, Capreolus pygargus
tgagcttcccgccgccccgtggcgagtaacacgcgcaaagagcatttataacgcgctcagacctaaagccacttgtcgcttacggtgacttcccataagacattgcaatatgcaaatactccagtgcgtcccgcccctggcagttccacgctgggacgtgcacgcactacggttcccgcctttagactgcgctcgcgattcctgggagagggctgatgacgtcagcgttcgggctccatggc

SEQ ID NO: 359 - DNA, 242 bp, Hydropotes inermis
tgagcttcccgccgccccgtggcgaacaacacgcgcaaagagcatttataacgcgctcagacctaaagccatttgtcgcttacggtgacttcccataagacattgcaatatgcaaatactccagtgcgtcccgcccctggcagttccacgctgggacgtgcacgcactacggttcccgcctttagactgcgctcgcgattcctgggagagggctgatgacgtcagcgttcgggctccatggc

SEQ ID NO: 360 - DNA, 242 bp, Muntiacus crinifrons
tgagcttcccgccgccccatggcgaaaatcacgcgcaaagagcatttataacgtgctcagacctaaagccactggtcgcttacggtgactccccataagacattgcgatatgcaaatactgcagtgcgtcccgcccctggcagttccacgctgggacgtacacgtactacggttcccgcctttagactgcgctcgcgattcctgggagagggctgatgacgtcagcgttcgggctccatggc

SEQ ID NO: 361 - DNA, 242 bp, Muntiacus muntjak
tgagcttcccgccgccccatggcgaaaatcacgcgcaaagagcatttataacgtgctcagacctaaagccacttgtcgcttacggtgactccccataagccattgcgatatgcaaatactgcagtgcgtcccgcccctggcagttccacgctgggacgtacacgtactacggttcccgcctttagactgtgctcgcgattcctgggagagggctgatgacgtcagcgttcgggctccatggc

SEQ ID NO: 362 - DNA, 242 bp, Muntiacus reevesi
tgagcttcccgccgccccatggcgaaaaacacgcgcaaagagcacttataacgtgctcagacctaaagccacttgtcgcttacggtgactccccataagacattgcgatatgcaaatactgtagtgcgtcccgcccctggcagttccacgctgggacgtgcacgcactacggttcccgcctttagactgcgctcgcgattcctgggagagggctgatgacgtcagcgttcgggctccatggc

SEQ ID NO: 363 - DNA, 242 bp, Muntiacus muntjak
tgagcttcccgccgccccatggcgaaaaacacgcgcaaagagcacttataacgtgctcagacctaaagccacttgtcgcttacggtgacttcccataagacattgcgatatgcaaatactgtagtgcgtcccgcccctggcagttccacgctgggacgtgcacgcactacggttcccgcctttagactgcgctcgcgattcctgggagagggctgatgacgtcagcgttcgggctccatggc

SEQ ID NO: 364 - DNA, 242 bp, Muntiacus muntjak; identical to SEQ ID NO: 363

SEQ ID NO: 365 - DNA, 242 bp, Muntiacus muntjak
tgagcttcccgccgccccatggcgaaaaacacgcgcaaagagcatttataacgtgctcagacctaaagccacttgtcgcttacggtgacttcccataagacattgcgatatgcaaatactgtagtgcgtcccgcccctggcagttccacgctgggacgtgcacgcactacggttcccgcctttagactgcgctcgcgattcctgggagagggctgatgacgtcagcgttcgggctccatggc

SEQ ID NO: 366 - DNA, 242 bp, Muntiacus reevesi
tgagcttcccgccgccccatggcgaaaaacacgcgcaaagagcatttataacgtgctcagacctaaagccacttgtcgcttacggtgacttcccataagacattgcgatatgcaaatactgcagtgcgtcccgcccctggcagttccacgctgggacgtgcacgcactacggttcccgcctttagactgcgctcgcgattcctgggagagggctgatgacgtcagcgttcgggctccatggc

SEQ ID NO: 367 - DNA, 239 bp, Muntiacus crinifrons
tgagcttcccgccgccccatggcgaaaacacgcgcaaagagcatttataacgtgctcagacctaaagccacttcgcttacggtgactccccataagacattgcgatatgcaaatactgcagtgcgtcccgcccctggcagttccacgctgggacgtgcacgcactacggttcccgcctttagactgcgctcgcgattcctgggagagggctgatgacgtcagcgttcgggctccatggc

SEQ ID NO: 368 - DNA, 242 bp, Cervus elaphus
tgagcttcccgccgccccacggcgaaaaacacgcgcaaagagcgtttataatgcgctcagacctaaagtaacttgtcacttacggtgacttcccataagacattgcgatatgcaaatattccagtgcgtcccgcccctggcagttccacgcggggacgtgcacgcactacggttcccgcctttagactgcgctggcgattcctgggagagggctgatgacgtcagcgtgcgggctccatggc

SEQ ID NO: 369 - DNA, 242 bp, Cervus albirostris
tgagcttcccgccgccccacggcgaaaaacacgcgcaaagagcgtttataatgcgctcagacctaaagtaacttgtcacttacggtgacttcccataagacactgcgatatgcaaatattccagtgcgtcccgcccctggcagttccacgccgggacgtgcacgcactacggttcccgcctttagactgcgctggcgattcctgggagagggctgatgacgtcagcgtgcgggctccatggc

SEQ ID NO: 370 - DNA, 242 bp, Cervus hanglu
tgagcttcccgccgccccacggcgaaaaacacgcgcaaagagcgtttataatgcgctcatacctaaagtaacttgtcacttacggtgacttcccataagacattgcgatatgcaaatattccagtgcgtcccgcccctggcagttccacgccgggacgtgcacgcactacggttcccgcctttagactgcgctggcgattcctgggagagggctgatgacgtcagcgtgcgggctccatggc

SEQ ID NO: 371 - DNA, 242 bp, Elaphurus davidianus
tgagcttcccgccgccccacggcgaaaagcacgcgcaaagagcgtttataacgcgctcagacctaaagctacttgtcacttacggtgacttcccataagacattgcgatatgcaaatattccagtgcgtcccgcccctggcagttccacgctgggacgtgcacgcactacgcttcccgcctttagactgcgctggcgattcctgggagagggctgatgacgtcagcgtgcgggctccatggc

SEQ ID NO: 372 - DNA, 242 bp, Axis porcinus
tgagcttcccgccgccccacggcgaaatacacgcgcaaagagcgtttataacgcgctcagacctaaaggtacttgtcacttacggtgacttcccataagacattgcgatatgcaaatattccagtgcgtcccgcccctggcagttccacgctgggacgtgcacgcactacggttcccgcctttagactgcgctggcgattcctgggagagggctgatgacgtcagcgttcgggctccatggc

SEQ ID NO: 373 - DNA, 241 bp, Alces alces
tgagcttcccgccgccccatggcggaaaatacgctcaaagagcatttataacgcgctcagacctaagtcacttgtcgcttacggtgacttcccataagacattgcgatatgcaaatacgacagtgcgtcccgcctctagcagttccacgctgggacgtgcacgcactacggttcccgcctttagactgcgcttgcgattcctgggagagggctgatgacgtcagcgttcgggctccatggc

SEQ ID NO: 374 - DNA, 241 bp, Alces alces; identical to SEQ ID NO: 373

SEQ ID NO: 375 - DNA, 242 bp, Odocoileus hemionus
tgagcttcccgccgccccacggaggataacgcgcgcaaagagcatttataatgcgcgcagacctaaagccacttgtcgcttacggtgacttcccataagacattgcgatatgcaaatattacagtgcgtcccgcccctggcagttccacgctgggacgtgcacgcgctacggttcccgcctttagactgcgctggcgattcctgggagcgggctgatgacgtcagcattcgggctccatggc

SEQ ID NO: 376 - DNA, 242 bp, Odocoileus hemionus
tgagcttcccgccgccycacgaaggataacgcgcgcaaagagcatttataatgcgcgcagacctaaagccacttgtcgcttacggtgacttcccataagacattgcgatatgcaaatattacagtgcgtcccgcccctggcagttccacgctgggacgtgcacgcgctacggttcccgcctttagactgcgctggcgattcctgggagcgggctgatgacgtcagcattcgggctccatggc

SEQ ID NO: 377 - DNA, 242 bp, Odocoileus virginianus
tgagcttcccgccgccccacggaggataacgcgcgcaaagagcatttataatgcgcgcagacctaaagccacttgtcgcttacggtgacttcccataagacattgcgatatgcaaatattacagtgcgtcccgcccctggcagttccacgctgggacgtgcacgcgctacggttcccgcctttagactgcgccggcgattactgggagcgggctgatgacgtcagcattcgggctccatggc

SEQ ID NO: 378 - DNA, 242 bp, Odocoileus virginianus
tgagcttcccgccgccccacggaggataacacgcgcaaagagcatttataatgcgcgcaaacctaaagccacttgtcgcttacggtgacttcccataagacattgcgatatgcaaatattacagtgcgtcccgcccctggcagttccacgctgggacgtgtacgcgctacggttcccgcctttagactgcgctggcgattcctgggagcgggctaatgacgtcagcattcgggctccatggc

SEQ ID NO: 379 - DNA, 242 bp, Rangifer tarandus
tgagcttcccgccgccccatggaggagaacgcgcgcaaaaagcatttataatgcgcgcagacctaaagccacttgtcgcttacggtgacttcccataagacattgcgagatgcaaatattacagtgtgtcccgcccctggcagttccacgctgggacgtgcacgcgctacggttcccgcctttagactgcgctggcgattcctgggagaggactgatgacgtcagcattcgggctccatggc

SEQ ID NO: 380 - DNA, 242 bp, Rangifer tarandus
tgagcttcccgccgccccatggaggagaacgcgcgcaaaaagcatttataatgcgcgcagacctaaagccacttgtcgcttacggtgacttcccataagacattgcgagatgcaaatattacagtgtgtcccgcccctggcagttccacgctgggacgtgcacgcgctacggttcccgcctttagactgtgctggcgattcctgggagaggactgatgacgtcagcattcgggctccatggc

SEQ ID NO: 381 - DNA, 238 bp, Procapra przewalskii
tgagcttccctccgccctacagctaaaactgcgcgcacacagtatttataatgagctcatgcataaagcaactttacggttacggtgacttcccacaagacattgcgacatgcaaatattttagtatatcccgcccctggtagttccacggacgcacacgcagtacggttcccgcctttagactgtgctggcgagtccagggagcgggctgatgacgtcagcgcccgggctccatggc

SEQ ID NO: 382 - DNA, 242 bp, Antilocapra americana
tgagcttccctccgccctatggcaaacgctgcgctcaaagagcgtttataatgcgctcacacccgaagccacttgtcgcttacggtgacttcccacaaggcattgcgatatgcaaatacggcggtgcgtcccgcccttggtcgttccacgctgggacgcacacgcacgacgattcccgcctttagactgcgccggcgattcccgcgagaggaccggtgacgtcagcgttcgggctccatggc

SEQ ID NO: 383 - DNA, 242 bp, Antilocapra americana
tgagcttccctccgccctatggcaaacgctgcgctcaaagagcgtttataatgtgctcacacccgaagacacttgtcgcttacggtgacttcccacaaggcattgcgatatgcaaatacggcggtgcgtcccgcccttggtcgttccacgctgggacgcacacgcacgacgattcccgcctttagactgcgccggcgattcccgcgagaggaccggtgacgtcagcgttcgggctccatggc

SEQ ID NO: 384 - DNA, 243 bp, Moschus moschiferus
tgagcttccctccgccctatggtaaaggccgcgcgcaaagagtatttataatgtgctcatagtgaaagccacttgacggttatggtgacttcccacaagacattgcgatatgcaaatattacagtgcgtcccgccccctggtcgttccacgctaggacgcacacgcacttcagttcccgcctttagactgcgcaggcgattcctgggagcgggctgatgacgtcagcgttcgggctccatggc

SEQ ID NO: 385 - DNA, 243 bp, Moschus moschiferus; identical to SEQ ID NO: 384

SEQ ID NO: 386 - DNA, 243 bp, Moschus berezovskii
tgagcttccctccgccctatggtaagggccgcgcgcaaagagtatttataacgtgctcatagtgaaagccacttgacggttatggtgacttcccacaagacattgcaatatgcaaatattacagtgcgtcccgccccctggtcgttccacgctaggacgcacacgcacttcagttcccgcctttagactgcgcaggcgattcctgggagcgggctgatgacgtcagcgttcgggctccatggc

SEQ ID NO: 387 - DNA, 243 bp, Moschus berezovskii; identical to SEQ ID NO: 386

SEQ ID NO: 388 - DNA, 243 bp, Moschus chrysogaster; identical to SEQ ID NO: 386

SEQ ID NO: 389 - DNA, 251 bp, Bubalus bubalis
tgagcttccctccgccctacggcaaacgaccgtcgcgcaaacaggagcacttataatgtgctcatacctagagccactttcggttacggtgacttctcaaaagacattgggacatgcaaatattacagtgcgtcccgcccctagtggagttccacgctaggacgcacgcgcactacggttcccgcctataggcgactgcgctggcggttcctgggagcggactgatgacgtcagtgttcggaatccatggc

SEQ ID NO: 390 - DNA, 243 bp, Balaenoptera bonaerensis
tgagcttccctccgccctatgccgaaagtttagcgcaacctgcctttataaggctcccaaacctaaagacatttgtcggttatggtgacttcccgcaacacattgcgacatgcaaatactgcggagcgtacctcccctggcaactcctcgctgggacgcacgcgcgctgcgtgctcccgccttttgactgcgccggcgatacttgggagagggttgatgacgccagcgttctggctccatggc

SEQ ID NO: 391 - DNA, 243 bp, Eschrichtius robustus
tgagcttccctccgccctataccgaaagtttagttcaagctgcatttataaagctcccaaacctaaagacatttgtcggttatggtgacttcccgcaacacattgcgacatgcaaatactgcggagtgcacctcccctggcaactcctcgctgggacgcacgcgcgctgcgtgctcccgccttttgactgcgccggcgatacctgggagagggttgatgacgtcagcgttctggctccatggc

SEQ ID NO: 392 - DNA, 243 bp, Eschrichtius robustus; identical to SEQ ID NO: 391

SEQ ID NO: 393 - DNA, 243 bp, Eschrichtius robustus
tgagcttccctccgccctataccgaaagtttagttcaagctgcatttataaagctcccaaacctaaagacatttgccggttatggtgacttcccgcaacacattgcgacatgcaaatactgcggagtgcacctcccctggcaactcctcgctgggacgcacgcgcgctgcgtgctcccgccttttgactgcgccggcgatacctgggagagggttgatgacgtcagcgttctggctccatggc

SEQ ID NO: 394 - DNA, 243 bp, Megaptera novaeangliae
tgagcttccctccgccctatgccgaaagttcagctcaacctgcatttataaagctcccaaacctaaagatatttgtcagttatggtgacttcccgcaacacattgcgacatgcaaatactgcggagtgcacctcccctggcaactcctcgctgggacgcacgcgtgctgcgtgctcccgccttttgactgcgccggcgatacttgggagagggttgatgacgtcagcgttctggctccatggc

SEQ ID NO: 395 - DNA, 243 bp, Balaenoptera musculus
tgagcttccctccgccctatgccgaaagtttagctcaacctgcgtttataaggctcccaaacctaaagacatttgtcggttatggtgacttcccgcaacacattgcgacatgcaaatactgcggagtgcacctcccctggcaactcctcgccgggacgcacgcgcgctgcgtgctcccgccttttgactgcgccggcgatacttgggagagggttgatgacgtcagcgttctggctccatggc

SEQ ID NO: 396 - DNA, 243 bp, Balaenoptera musculus
tgagcttccctccgccctatgccgaaaatttagctcaacctgcatttataaggctcccaaacctaaagacatttctcggttatggtgacttcccgcaacgcattgcgacatgcaaatactgcggagtgcacctcccctggcaactcctcgctgggacgcacgcgcgctgcgtgctcccgccttttgactgcgccggcgatacttgggagagggttgatgacgtcagcgttctggctccatggc

SEQ ID NO: 397 - DNA, 240 bp, Balaenoptera physalus
tgagcttccctccgccctatgccgaaagtttagctcaagcatttataaggctcccacacctaaagacatttgtcggttatggtgacttcccgcaacacattgcgacatgcaaatactgcggagtgcacctcccctggcaactcctcgctgggacgcacgcgcgctgcgtgctcccgccttttgactgcgccggcgatacttgggagagggttgatgacgtcagcgttctggctccatggc

SEQ ID NO: 398 - DNA, 241 bp, Eubalaena japonica
tgagcttccctccgccctatgccgaaagtttacctcaagctgcatttataaggctcccaaacctaaagacatttgtcggttatggtgacttcccgcaacacattgcgacatgcaaattgcggagcgtacctcccctggcaactcctcgctgggacgcacgcgcgctgcgtgctcccgccttttgactgcgccggcggtacttgggagagggttgatgacgtcagcgttctggctccatggc

SEQ ID NO: 399 - DNA, 245 bp, Balaenoptera acutorostrata
tgagcttccctccgccctatgcggaaagtttagctcaacttgcattataaggctcccaaacctaaagacatttgtcggttatggtgacttcccgcaacacattgcgacatgcaaatactgcggagtgcacccccccccctggcaactcctcgctgggacgcacgcgcgctgcgtgctcccgccttttgactgcgccggcgatacttgggagagggttgatgacgtcagcattctggctccatggc

SEQ ID NO: 400 - DNA, 243 bp, Platanista minor
tgagcttccctccgccctatactcgaaatgtagctcgagccgcatttataaggctcccaagcctaaatacatttgtcgtttatggtgacttcccgcaacacattgcgacatgcaaatactgcggagcgtacctcccctggcaactcctcgctgggacgcacgcgcgctacgtgctcccgccttttgactgcgcgggcgatacttgggagagggttgatgacgtcagcgttctggctccatggc

SEQ ID NO: 401 - DNA, 243 bp, Phocoena phocoena
tgagcttcccgccgccctacaccgaaaaccaggctcaagccacatttataaggctcccaaagcgaaatacatttgtcggttatggtgacttcccgcaacacattgcgacatgcaaatactgcggagcgttcctcccctggcaactcctcgctgggacgcacgcgcactacgtgctcccgccttttgactgcgccggcgatacttgggagagagttgatgacgtcagcgttctggctccatggc

SEQ ID NO: 402 - DNA, 243 bp, Neophocaena asiaeorientalis
tgagcttcccgccgccctacgccgaaaaccaggctcaagccacatttataaggctcccaaagcgaaatacatttgacggttatggtgacttcccgcaacacattgcgacatgcaaatactgcggagcgttcctcccctggcaactcctcgctgggacgcacgcgcactacgtgctcccgccttttgactgcgccggcgatacttgggagagagttgatgacgtcagcgttctggctccatggc

SEQ ID NO: 403 - DNA, 243 bp, Phocoena sinus
tgagcttcccgccgccctacgctgaaaaccaggcgcaagccacatttataaggctcccaaagcgaaatacatttgtcgattatggtgacttcccgcaacacattgcgacatgcaaatactgcggagcgttcctcccctggcaactcctcgctgggacgcacgcgcactacgtgctcccgccttttgactgcgccggcgatacttgggagagagttgatgacgtcagcgttctggctccatggc

SEQ ID NO: 404 - DNA, 243 bp, Monodon monoceros
tgagcttcccaccgccctacgccgaaaaccagcctcaagccacatttataaggctcgcaaaccgaaatacatttgtcggttatggtgacttcccgcaacacattgcgacatgcaaatactgcggagcgttcctcccctggcaactcctcgctgggacgcaagcgcactacgtgctcccgccttttgactgcgcccgcgatacttgggagagggttgatgacgtcagcgttctggctccatggc

SEQ ID NO: 405 - DNA, 243 bp, Monodon monoceros
tgagcttcccaccgccctacgccgaaaaccagcctcaagccacatttataaggctcgcaaaccgaaatacatttgtcggttatggtgacttcccgcaacacattgcgacatgcaaatactgcggagcgttcctcccctggcaactcctcgctgggacgcaagcgcactacgtgctcccgccttttgactgcgccggcgatacttgggagagggttgatgacgtcagcgttctggctccatggc

SEQ ID NO: 406 - DNA, 243 bp, Monodon monoceros; identical to SEQ ID NO: 405

SEQ ID NO: 407 - DNA, 243 bp, Monodon monoceros; identical to SEQ ID NO: 405

SEQ ID NO: 408 - DNA, 243 bp, Delphinapterus leucas
tgagcttcccgccgccctacgctgaaaaccaggctcaagccacatttataaggctcgcaaaccgaaatacatttgtcggttatggtgacttcccgtaacacattgcgacatgcaaatactgcggagcgttcctcccctggcaactcctcgctgggacgcacgcgcactacgtgctcccgccttttgactgcgccggcgatacttgggagagggttgatgacgtcagcgttctggctccatggc

SEQ ID NO: 409 - DNA, 243 bp, Delphinapterus leucas; identical to SEQ ID NO: 408

SEQ ID NO: 410 - DNA, 243 bp, Delphinapterus leucas; identical to SEQ ID NO: 408

SEQ ID NO: 411 - DNA, 243 bp, Tursiops aduncus
tgagcttcccgccgccctacaccgaaaaccaggctcaaggcacatttataaggctcccaaatctaagtacatttgtcggttatggtgacttcccgcaccacattgcgacatgcaaatactgcggagcgtccctcccctggcaactcctcgctgggacgcacgcgcgctacgtgctcccgccttttgactgcgccggcgatacttgggagagggttgatgacgtcagcgttctggctccatggc

SEQ ID NO: 412 - DNA, 243 bp, Tursiops aduncus; identical to SEQ ID NO: 411

SEQ ID NO: 413 - DNA, 243 bp, Tursiops aduncus; identical to SEQ ID NO: 411

SEQ ID NO: 414 - DNA, 243 bp, Tursiops aduncus
tgagcttcccgccgccctacgccgaaaaccaggctcaagccacatttataaggctcccaaatctaagtacatttgtcggttatggtgacttcccgcaccacattgcgacatgcaaatactgcggagcgtccctcccctggcaactcctcgctgggacgcacgcgcgctacgtgctcccgccttttgactgcgccggcgatacttgggagagggttgatgacgtcagcgttctggctccatggc

SEQ ID NO: 415 - DNA, 243 bp, Tursiops truncatus; identical to SEQ ID NO: 414

SEQ ID NO: 416 - DNA, 243 bp, Tursiops truncatus; identical to SEQ ID NO: 414

SEQ ID NO: 417 - DNA, 243 bp, Tursiops truncatus; identical to SEQ ID NO: 414

SEQ ID NO: 418 - DNA, 243 bp, Tursiops truncatus; identical to SEQ ID NO: 414

SEQ ID NO: 419 - DNA, 243 bp, Tursiops truncatus
tgagctccccgccgccctacgccgaaaaccaggctcaagccacatttataaggctcccaaatctaagtacatttgtcggttatggtgacttcccgcaccacattgcgacatgcaaatactgcggagcgtccctcccctggcaactcctcgctgggacgcacgcgcgctacgtgctcccgccttttgactgcgccggcgatacttgggagagggttgatgacgtcagcgttctggctccatggc

SEQ ID NO: 420 - DNA, 243 bp, Sousa chinensis
tgagcttcccgccgccctacgctaaagaccaggctcaagccacatttataaggctcccaaagctaagtacatttgtcggttatggtgacttcccgcaccacattgcgacatgcaaatactgcggagcgtccctcccctggcaactcctcgctgggacgcacgcgcgctacgtgctcccgccttttgactgcgccggcgatacttgggagagggttgatgacgtcagcgttctggctccatggc

SEQ ID NO: 421 - DNA, 243 bp, Sousa chinensis; identical to SEQ ID NO: 420

SEQ ID NO: 422 - DNA, 243 bp, Lagenorhynchus obliquidens
tgagcttcccgccgccctacgccgaaaaccagcctcaagccacatttataaggctcccaaacctaagtacatttgtcggttatggtgacttcccgcaacacattgcgacatgcaaatactgcggagcgtccctcccctggcaactcctcgctgggacgcacgcgcgctacgtgctcccgccttttgactgcgccggcgatacttgggagagggttgatgacgtcagcgttctggctccatggc

SEQ ID NO: 423 - DNA, 243 bp, Globicephala melas
tgagcttcccgccgccctacgccgaaaaccaggctcaagccacatttataaggctcccaaacctaagtacatttgtcggttatggtgacttcccgcaacacattgcgacatgcaaatactgcggagcgttcctcctctggcaactcctcgctgggacgcacgcgcgctacgtgctcccgccttttgactgcgccggcgatacttgggatagggttgatgacgtcagcgttctggctccatggc

SEQ ID NO: 424 - DNA, 243 bp, Orcinus orca
tgagcttcccgccgccctacgccgaaaaccaggctcaagccacatttataaggctcccaaacctaaatacatttgtcggttatggtgacttcccgcaacacattgcgacatgcaaatactgcggagcgttcctcccctagcaactcctcgctgggacgcacgcgcgctacgtgctcccgccttttgaccgagccggcgatacttgggagagggttgatgacgtcagcgttctggctccatggc

SEQ ID NO: 425 - DNA, 243 bp, Lipotes vexillifer
tgagcttcccgccgccctgtggcgaaaaactagtttagtccacatttataaggctcccaaacctaaatacatttgtcggttatggtgacttcccgcaacacattgcgacatgcaaatactgcggagcgttcctcccctggcaactcctcgctgggacgcacgcgcgctacgtgatcccgccttttggctgcgccggcgatacttgggagagggttgatgacgtcagcgttctggctccatggc

SEQ ID NO: 426 - DNA, 243 bp, Inia geoffrensis
tgagcttcccgccgccctacgtcgaaaggtatactcaagccacatttataaggctcccaaacctaaatacatttgacggttatggtgacttcccgcaacacattgcgacatgcaaatactgaggagcgtacctcccctgacaactcctcgctgggacgcacgcgcgcttcgtgctcccgcctcttgactgcgccggcgacacttgggagagggttgatgacgtcaccgttctggctccatggc

SEQ ID NO: 427 - DNA, 242 bp, Pontoporia blainvillei
tgagcttcccaccgccctacgcggaaagtacggtcaagtcacatttataaggctcccaaacctaaatacatttctcgcttatggtgacttcccgcaacacattgcgacatgcaaatactgcggagcgtacctcccctggcaactcctagctgggacgcacgcgcgctacatgctcccgccttttgactgcaccggcgacgcttgggagagggttgatgacgtcagcgttctggctccatggc

SEQ ID NO: 428 - DNA, 242 bp, Pontoporia blainvillei; identical to SEQ ID NO: 427

SEQ ID NO: 429 - DNA, 243 bp, Kogia breviceps
tgagcttccctccgccctattccgaaaactgaactcgcagagtacttataaggctctcaagcctaaagacatttgtaggttatggtgacttcccgtaacacattgcgacatgcaaatactgcggagcgtacctcccctgacaactcctcgctgggacgcacgcgcgctacgtgctcccgcctttggactgagccggcgatacttgggagagggttgatgacgtcagcgttctggctccatggc

SEQ ID NO: 430 - DNA, 242 bp, Physeter catodon
tgagcttccctccgccctatgacaaaagggagcgcaaaccgtatttataaagctctcaagcctaaaggcatttgtaggttatggtgacttcccgcaacacattgcgacatgcaaatactgcggagcgtacctccccaggcaactcctcgctgggacgcacgcgcgctacgtgctcccgcctttggactgcgccggcgatacttgggagagggttgatgacgtcagcgttctggctccatggc

SEQ ID NO: 431 - DNA, 242 bp, Physeter catodon; identical to SEQ ID NO: 430

SEQ ID NO: 432 - DNA, 242 bp, Physeter catodon; identical to SEQ ID NO: 430

SEQ ID NO: 433 - DNA, 242 bp, Mesoplodon bidens
tgagcttctctccgccctatgccgaaagcttaccttcgcccgccttataaggctcccaaccctaaatacatttgtaggttatggtgacttcccgcaacacattgcgacatgcaaatactgcggagcgtacctcccctggaaactcctcgctgggacgcacgcgcattacgtgctcccgccttttgactgagccggcgatacttgggagagggttgatgacatcagcgttctggctccatggc

SEQ ID NO: 434 - DNA, 242 bp, Ziphius cavirostris
tgagcttccctccgccctacgtcgaaaccttattttcccccgccttataaggctcccaaacctaaatacatttgtacgttatggtgacttcccgcaacacattgcgacatgcaaatactgcggagcgtacctctcctggaaactcctcgctgggacgcacgcgcgttacgtcctcccgccttttgactgagccggcgatacttgggagaaggttgatgacgtcagcgttctggctccatggc

SEQ ID NO: 435 - DNA, 242 bp, Hippopotamus amphibius
tgagcttccctccgccctgacgcaaaagctgttggaagcagtatttataaggctccgaaacgtaaagacatttgtcagttacggtgacttcccacaacacattgcggcatgcaaataccacggagtgtacctcccctggccacgcctcgctgggacgcatgagcgctacgtgttcccgccttttgactgcgccggcgatacccgggagagggttgatgacgtcacctttcgggcaccatggc

SEQ ID NO: 436 - DNA, 242 bp, Hippopotamus amphibius
tgagcttccctccgccctgacgcaaaagctgtcagaagcagtatttataaggctccgaaacgtaaagacatttgtcggttacggtgacttcccacaacacattgcggcatgcaaataccacggagtgtacctcccctggccacgcctcgctgggacgcatgagcgctacgtgttcccgccttttgactgcgccggcgatacccgggagagggttgatgacgtcacctttcgggcaccatggc

SEQ ID NO: 437 - DNA, 258 bp, Vicugna pacos
tgagcttccctccgccctatgggaaagggtgggctcacgcagcctttataagactcccaaacttaaagacatttctcggttatggcgacttcccacaagacatagcgacatgcaaatactgcagacctgtggcgccgacccggtcctgtgcagccatctttacggctgggacgcacgcgcgctgcgtgttcccgccctgtgactgcgccggcgattactgggagaggattgatgacgtcaacgttcgggttccatggc

SEQ ID NO: 438 - DNA, 258 bp, Vicugna vicugna; identical to SEQ ID NO: 437

SEQ ID NO: 439 - DNA, 258 bp, Vicugna pacos; identical to SEQ ID NO: 437

SEQ ID NO: 440 - DNA, 258 bp, Lama guanicoe
tgagcttccctccgccctatgggaaagggtgggctcacgcagcatttataagactcccaaacttaaagacatttctcggttatggcgacttcccacaagacatagcgacatgcaaatactgcagacctgtggcgccgacccggtcctgtgcagccatctttacggctgggacgcacgcgcgctgcgtgttcccgccctgtgactgcgccggcgattactgggagaggattgatgacgtcaacgttcgggttccatggc

SEQ ID NO: 441 - DNA, 258 bp, Lama glama
tgagcttccctccgccctatgggaaagggtgggctcacgcagcatttataagactcccaaacttaaagacatttctcggttatggcgacttcccacaagacatagcgacatgcaaatactgcagacctgttgcgccgacccggtcctgtgcagccatctttacggctgggacgcacgcgcgctgcgtgttcccgccctgtgactgcgccggcgattactgggagaggattgatgacgtcaacgttcgggttccatggc

SEQ ID NO: 442 - DNA, 258 bp, Camelus dromedarius
tgagcttccctccgccctatgagagagggtgggctcacgccacctttataaggctcccaaacttaaagacatttctcggttatggcgacttcccacaacacatagcgacatgcaaatactgcagacctgtggcgccgacccggtcctgtgcagccatctttacggctgggacgcacgcgcgctgcgtgttcccgccctgtgactgcgccggcgattactgggagaggattgatgacgtcaacgttcaggttccatggc

SEQ ID NO: 443 - DNA, 258 bp, Camelus dromedarius; identical to SEQ ID NO: 442

SEQ ID NO: 444 - DNA, 258 bp, Camelus dromedarius
tgagcttccctccgccctatgagagagggtgggctcacgccacctttataaggctcccaaacttaaagacatttctcggttatggcgacttcccacaacacatagcgacatgcaaatactgcagacctgtggcgccgacccagtcctgtgcagccatctttacggctgggacgcacgcgcgctgcgtgttcccgccctgtgactgcgccggcgattactgggagaggattgatgacgtcaacgttcgggttccatggc

SEQ ID NO: 445 - DNA, 258 bp, Camelus ferus
tgagcttccctccgccctatgagaaagggtgggctcacgccacctttataaggctcccaaacttaaagacatttctcggttatggcgacttcccacaacacatagcgacatgcaaatactgcagacctgtggcgccgacccggtcctgtgcagccatctttacggctgggacgcacgcgcgctgcgtgttcccgccctgtgactgcgccggcgattactgggagaggattgatgacgtcaacgttcgggttccatggc

SEQ ID NO: 446 - DNA, 258 bp, Camelus ferus
tgagcttccctccgccctatgagaaagggtgggctcacgccacctttataaggctcccaaacttaaagacatttctcggttatggcgacttcccacaacacatagcgacatgcaaatactgcagacctgtggcgccgacccggtcctgtgcagccatctttaaggctgggacgcacgcgcgctgcgtgttcccgccctgtgactgcgccggcgattactgggagaggattgatgacgtcaacgttcgggttccatggc

SEQ ID NO: 447 - DNA, 258 bp, Camelus bactrianus; identical to SEQ ID NO: 446

SEQ ID NO: 448 - DNA, 245 bp, Tragulus javanicus
tgagcttccctccgccctatgcagaagggcgcactcaagccgtgtttatatcaagcccatgagcacagtcacttgcaggctacggtgactccccacaagccattgcgacatgcaaatactgcggcaggcccctcctcgggtaactccacgctgggacgcacgcgccctacgcgttcccgcctttactgacggcgccagcgattcccgggagatggttgatgacgtcggcgatcgggctccatggc

SEQ ID NO: 449 - DNA, 245 bp, Tragulus kanchil
tgagcttccctccgccctatgcagaagtgcgcactcaagccgtgtttatatcaagcccatgagcacagtcacttgcaggctacggtgactccccacaagccattgcgacatgcaaatactgcggcaggcccctcctcgggtaactccacgctgggacgcacgcgccctacgcgttcccgcctttactgacggcgccagcgattcccgggagatggttgatgacgtcggcgatcgggctccatggc

SEQ ID NO: 450 - DNA, 253 bp, Sus scrofa
tgagcttctctccgccctacgtaggaaaactgctcctgtgagcacttataaaactcccataagtagagagatttcatagttatggtgatttcccataagacattgcgacatgcaaatattgtggcgcgttcgtccccgtccggtgcaggcagcttcgctccaggacgcacgcgcaatacatgttcccgccttgagactgcgccggcagattcctaggaagtggttgatgacgtagatgttagggatccatggc

SEQ ID NO: 451 - DNA, 253 bp, Sus scrofa; identical to SEQ ID NO: 450

SEQ ID NO: 452 - DNA, 253 bp, Sus scrofa; identical to SEQ ID NO: 450

SEQ ID NO: 453 - DNA, 253 bp, Sus scrofa; identical to SEQ ID NO: 450

SEQ ID NO: 454 - DNA, 253 bp, Sus scrofa
tgagcttctctccgccctacgtagaaaaactgcttctgtgagcacttataaaactcccataagtagagagatttcatagttatggtgatttcccataagacattgcgacatgcaaatattgtggcgcgttcgtccccgtccggtgcaggcagcttcgctccaggacgcacgcgcaatacatgttcccgccttgagactgcgccggcagattcctaggaagtggttgatgacgtcgatgttagggatccatggc

SEQ ID NO: 455 - DNA, 253 bp, Sus scrofa
tgagcttctctccgccctacgtaggaaaactgcttctgtgagcacttataaaactcccataagtagagagatttcatagttatggtgatttcccataagacattgcgacatgcaaatattgtggcgcgttcgtccccgtccggtgcaggcagcttcgctccaggacgcacgcgcaatacatgttcccgccttgagactgcgccggcagattcctaggaagtggttgatgacgtcgatgttagggatccatggc

SEQ ID NO: 456 - DNA, 253 bp, Sus scrofa; identical to SEQ ID NO: 455

SEQ ID NO: 457 - DNA, 253 bp, Sus scrofa; identical to SEQ ID NO: 455

SEQ ID NO: 458 - DNA, 253 bp, Sus scrofa; identical to SEQ ID NO: 455

SEQ ID NO: 459 - DNA, 253 bp, Sus scrofa; identical to SEQ ID NO: 455

SEQ ID NO: 460 - DNA, 253 bp, Sus scrofa; identical to SEQ ID NO: 455

SEQ ID NO: 461 - DNA, 253 bp, Sus scrofa; identical to SEQ ID NO: 455

SEQ ID NO: 462 - DNA, 253 bp, Sus scrofa
tgagcttctctccgccctacgtaggaaaactgcttctgtgagcacttataaaactcccataagtagagagatttcatagttatggtgacttcccataagacattgcgacatgcaaatatggtggcgcgttcgtccccgtccggtgcaggcagcttcgctccaggacgcacgcgcaatacatgttcccgccttgagactgcgccggcagattcctaggaagtggttgatgacgtcgatgttagggatccatggc

SEQ ID NO: 463 - DNA, 253 bp, Sus scrofa; identical to SEQ ID NO: 462

SEQ ID NO: 464 - DNA, 253 bp, Sus scrofa
tgagcttctctccgccctacgtagaaaaactgcttctgtgagcacttataaaactcccataagtagagagatttcatagttatggtgacttcccataagacattgcgacatgcaaatatggtggcgcgttcgtccccgtccggtgcaggcagcttcgctccaggacgcacgcgcaatacatgttcccgccttgagactgcgccggcagattcctaggaagtggttgatgacgtcgatgttagggatccatggc

SEQ ID NO: 465 - DNA, 253 bp, Sus scrofa
tgagcttctctccgccctacgtaggaaaacagcttctgtgagcacttataaaactcccataagtagagagatttcatagttatggtgacttcccataagacattgcgacatgcaaatattgtggcgcgttggtccccgtccggtgcaggcagcttcgctccaggacgcacgcgcaatacatgttcccgccttgagactgcgccggccgattcctaggaagtggttgatgacgtcgatgttggggctccatggc

SEQ ID NO: 466 - DNA, 253 bp, Sus scrofa; identical to SEQ ID NO: 465

SEQ ID NO: 467 - DNA, 253 bp, Sus scrofa
tgagcttctctccgccctacgtaagaaaactacctctgtgagcacttataaaactcccataagtagagagatttcatagttatggtgacttcccataagacattgcgacatgcaaatattgtggcgcggtcgtccccgtccggtgcaggcagtttcgctccaggacgcacgcgcactacatgttcccgccttgagactgcgccggccgattcctaggaagtggttgatgacgtcgatgttggggctccatggc

SEQ ID NO: 468 - DNA, 253 bp, Catagonus wagneri
tgagcttctctccgccctacggagaaaacctcctggaccgagcatttataaagctcccatacttacagtgatttcatagttatggtgacttcccacaagacattgcgagatgcaaatattgtggagggtacttccccgtcctgtgcgaacagcttccggccaggacgtaggcgcgcagcgtgttcccgccttgagactgtgccggcgattcctaggagggtggttgatgacgtcaatattcgggctccatggc

SEQ ID NO: 469 - DNA, 244 bp, Artificial Sequence
  Description of Artificial Sequence: Synthetic polynucleotide
  modified_base (172)..(172): a, c, t, or g
tgagcttccckccgccctaygsmraamamyrssckcaarsmgcatttataakgmkcycawacctaragmcayttkwcggttayggtgacttcccayaasacattgcgacatgcaaataytdyrgwgcgtycckcccctggyarytccwcgctrggacgcacrcgcrctacgngttcccgcctttwgactgcgcyggcgattccwgggagmggrytgatgacgtcagcgttcgggmtccatggcg

SEQ ID NO: 470 - DNA, 248 bp, Artificial Sequence
  Description of Artificial Sequence: Synthetic polynucleotide
  modified_base (131)..(133): a, c, t, or g
  modified_base (144)..(144): a, c, t, or g
  modified_base (176)..(176): a, c, t, or g
tgagcttccckccgccctaygbmrravrvydssykcardsmrcayttataadghkcycadamstarakmsayttbwcrsttayggtgacttcycryaasacattgsgayatgcaaataytdyrgwgcgtynnncckcscctggnyarytyywcgcyrggacgcacrcgcrctrcgngytcccgcctttwgactgcgcyggcgatwcywgggagmggrytgatgacgtcarygttskggmtccatggcg

SEQ ID NO: 471 - DNA, 252 bp, Artificial Sequence
  Description of Artificial Sequence: Synthetic polynucleotide
  modified_base (27)..(27): a, c, t, or g
  modified_base (52)..(52): a, c, t, or g
  modified_base (131)..(133): a, c, t, or g
  modified_base (144)..(148): a, c, t, or g
  modified_base (180)..(180): a, c, t, or g
tgagcttccckccgcccyayrbvrranrvydvvykcwrdbmrcryttataanrhkcycadamstarakhsayttbwyrsttayggtgacttcycryaasacaktgsgryatgcaaataytdyrghgygyhnnnccbcsycyggnnnnnyarytyydckcyrggacgyrcrcgcrmtrcrngytcccgcctwkwgactgcgcyggcgatwcywrsgagmkgrytgatgacgtcarygttskggmtccatggcg

SEQ ID NO: 472 - DNA, 262 bp, Artificial Sequence
  Description of Artificial Sequence: Synthetic polynucleotide
  modified_base (22)..(23): a, c, t, or g
  modified_base (27)..(27): a, c, t, or g
  modified_base (29)..(29): a, c, t, or g
  modified_base (39)..(39): a, c, t, or g
  modified_base (52)..(52): a, c, t, or g
  modified_base (95)..(95): a, c, t, or g
  modified_base (127)..(132): a, c, t, or g
  modified_base (138)..(140): a, c, t, or g
  modified_base (151)..(156): a, c, t, or g
  modified_base (167)..(167): a, c, t, or g
  modified_base (189)..(189): a, c, t, or g
  modified_base (215)..(215): a, c, t, or g
  modified_base (224)..(224): a, c, t, or g
tgagcttcyckccgcccyayrnnrrrnrnbdvvbbcwvnbmryvyttataanrhkcbcadavbkarrkhvayttbwyrvttayggygayttcycnrhamsrcakwgsrryatgcaaataykdyrghnnnnnngyryhnnnccbsbycyrknnnnnnyadbtyydckncyrggacgyrsrcgcrmtrcrngytcccgccywkwgactgcgcysgcngatwmyhrngarvkgrytgatgacgtcrryrttvkgghtccatggcg

SEQ ID NO: 473 - DNA, 264 bp, Artificial Sequence
  Description of Artificial Sequence: Synthetic polynucleotide
  modified_base (22)..(23): a, c, t, or g
  modified_base (26)..(29): a, c, t, or g
  modified_base (31)..(35): a, c, t, or g
  modified_base (39)..(40): a, c, t, or g
  modified_base (52)..(52): a, c, t, or g
  modified_base (54)..(54): a, c, t, or g
  modified_base (60)..(60): a, c, t, or g
  modified_base (62)..(62): a, c, t, or g
  modified_base (65)..(65): a, c, t, or g
  modified_base (69)..(70): a, c, t, or g
  modified_base (73)..(75): a, c, t, or g
  modified_base (95)..(95): a, c, t, or g
  modified_base (122)..(122): a, c, t, or g
  modified_base (127)..(132): a, c, t, or g
  modified_base (138)..(140): a, c, t, or g
  modified_base (151)..(156): a, c, t, or g
  modified_base (166)..(170): a, c, t, or g
  modified_base (178)..(178): a, c, t, or g
  modified_base (186)..(186): a, c, t, or g
  modified_base (189)..(189): a, c, t, or g
  modified_base (203)..(204): a, c, t, or g
  modified_base (217)..(217): a, c, t, or g
  modified_base (224)..(224): a, c, t, or g
  modified_base (226)..(226): a, c, t, or g
  modified_base (252)..(252): a, c, t, or g
tgagcttcycdccgcccyryvnnvrnnnnbnnnnnbdvnnhryvyttataanrndcbsrnrnbbnvrknnaynnnhhrvttayggygaytycycnrhamsvmabwgsrrbatgyaaataybnyrghnnnnnnrbryhnnnccbsbychddnnnnnnhmdbkyydhnnnnngkacryrnrcryvvbnyrnsytccsgccywkdnngaybghrchvgyngrywmynrngarvkrvytgatgacgymrvyrhkvngrhwccatggcg

SEQ ID NO: 474 - DNA, 272 bp, Artificial Sequence
  Description of Artificial Sequence: Synthetic polynucleotide
  modified_base (21)..(35): a, c, t, or g
  modified_base (37)..(42): a, c, t, or g
  modified_base (44)..(46): a, c, t, or g
  modified_base (49)..(50): a, c, t, or g
  modified_base (57)..(57): a, c, t, or g
  modified_base (59)..(59): a, c, t, or g
  modified_base (65)..(65): a, c, t, or g
  modified_base (67)..(68): a, c, t, or g
  modified_base (70)..(70): a, c, t, or g
  modified_base (74)..(75): a, c, t, or g
  modified_base (78)..(80): a, c, t, or g
  modified_base (84)..(84): a, c, t, or g
  modified_base (100)..(100): a, c, t, or g
  modified_base (114)..(114): a, c, t, or g
  modified_base (125)..(126): a, c, t, or g
  modified_base (128)..(128): a, c, t, or g
  modified_base (131)..(131): a, c, t, or g
  modified_base (133)..(138): a, c, t, or g
  modified_base (144)..(146): a, c, t, or g
  modified_base (149)..(150): a, c, t, or g
  modified_base (154)..(154): a, c, t, or g
  modified_base (157)..(163): a, c, t, or g
  modified_base (170)..(176): a, c, t, or g
  modified_base (184)..(184): a, c, t, or g
  modified_base (190)..(192): a, c, t, or g
  modified_base (195)..(195): a, c, t, or g
  modified_base (209)..(211): a, c, t, or g
  modified_base (218)..(218): a, c, t, or g
  modified_base (220)..(221): a, c, t, or g
  modified_base (224)..(224): a, c, t, or g
  modified_base (231)..(231): a, c, t, or g
  modified_base (233)..(233): a, c, t, or g
  modified_base (238)..(239): a, c, t, or g
  modified_base (259)..(260): a, c, t, or g
tgagctycycdccgccyyrhnnnnnnnnnnnnnnnbnnnnnnvnnnrynntwatawnrndcbsrnvnnbnvrbnnaynnnhhvnytayggygaytycycnrhamsvvabwgsrnrbatgyaaatnnbnhrnhnnnnnnrbrbhnnncsnnbyynddnnnnnnnmdbbybnnnnnnnrdrcvbrnrmryvnnnhrnvhyccsrccyhkdnnngvybbhnsnnsyngrbdmynrngadvnnrvyyrrtgacrymrvydhbnnrrhdcbatggcg

SEQ ID NO: 475 - DNA, 255 bp, Felis catus
tgagcttccctccgccctatgggaaagggtggccccgccgagcatttataagactcccatacctaaagacatttctcagttatggtgatttccctcaaacacacagcaacatgcaaatatcgaggggtgtaccgcccctgtcctttgtagacgtcttctctccaggacgcacgcgcgctgtattcccgccttgtgactctaggcgggcgattcctgggagagggttgatgacgtccaagttctggcttcatggcg

SEQ ID NO: 476 - DNA, 254 bp, Felis nigripes
tgagcttccctccgccctatgggaaagggtggccccgccgagcatttataagactcccatacctaaagacatttctcagttatggtgatttcccacaacacacagcaacatgcaaatatcgaggggtgtaccgcccctgtcctttgtagacgtcttctctccaggacgcacgcgcactgtattcccgccttgtgactctaggcgggcgattcctgggagagggttgatgacgtccaagttctggcttcatggcg

SEQ ID NO: 477 - DNA, 254 bp, Felis catus
tgagcttccctccgccctatgggaaagggtggccccgccgagcatttataagactcccatacctaaagacatttctcagttatggtgatttcccacaacacacagcaacatgcaaatatcgaggggtgtaccgcccctgtcctttgtagacgtcttctctccaggacgcacgcgcgctgtattcccgccttgtgactctaggcgggcgattcctgggagagggttgatgacgtccaagttctggcttcatggcg

SEQ ID NO: 478 - DNA, 254 bp, Felis catus; identical to SEQ ID NO: 477

SEQ ID NO: 479 - DNA, 254 bp, Puma concolor
tgagcttccctccgccctatgggaaagggtggccccgccgagcatttataagactcccatacctaaagacatttctcagttatggtgatttcccacaacacacagcaacatgcaaatatcgaggggtgtaccgcccctgtcctttgtagacgtcttctctccaggacgcacgcgcgctgtattcccgccttgtgactctaggcgggcgattcctgggagagggttgatgacgtccgagttctggcttcatggcg

SEQ ID NO: 480 - DNA, 254 bp, Puma concolor; identical to SEQ ID NO: 479

SEQ ID NO: 481 - DNA, 254 bp, Acinonyx jubatus
tgagcttccctccgccctatgggaaagggtggccccgccgagcatttataagactcccatacctaaagacatttctcagttatggtgatttcccacaacacacagcaacatgcaaataccgaggggtgtaccgcccctgtcctttgtagacgtcttctctccaggacgcacgcgcgctgtattcccgccttgtgactctaggcgggcgattcctgggagagggttgatgacgtccaagttctggcttcatggcg

SEQ ID NO: 482 - DNA, 254 bp, Acinonyx jubatus; identical to SEQ ID NO: 481

SEQ ID NO: 483 - DNA, 254 bp, Lynx pardinus
tgagcttccctccgccctatgggaaagggtggccccgccgagcatttataagactcccatacctaaagacatttctcagttatggtgatttcccacaacacacagcaacatgcaaatatcgaggggtgtaccgcccctgtcctttgtagacgtcttctctccaggacgcacgcgcgctgtattcccgccttgtgactctaggcgggtgattcctgggagagggttgatgacgtccaggttctggcttcatggcg

SEQ ID NO: 484 - DNA, 254 bp, Lynx canadensis
tgagcttccctccgccctatgggaaagggtggccccgccgagcatttataagactcccatacctaaagacatttctcagttatggtgatttcccacaacacacagcaacatgcaaatatcgaggggtgtaccgcccctgtcctttgtagacgtcttctctccaggacgcacgcgcgctgtattcccgccttgtgactctaggcgggcgattcctgggagagggttgatgacgtccaggttctggcttcatggcg

SEQ ID NO: 485 - DNA, 254 bp, Puma yagouaroundi
tgagcttccctccgccctatgggaaagggtggccccgcagagcatttataagactcccatacctaaagacatttcacagttatggtgatttcccacaacacacagcaacatgcaaatatcgaggggtgtaccgcccctgtcctttgtagacgtcttctctccaggacgcacgcgcgctgtattcccgccttgtgactctaggcgggcgattcctgggagagggttgatgacgtccaagttctggcttcatggcg

SEQ ID NO: 486 - DNA, 252 bp, Panthera onca
tgagcttccctccgccctatgggaaagggtggctccgccgagcatttataagactcccatacctaaagacatttctcagttatggtgacttcccacaacgcacagcaacatgcaaatatcgaggggtgtaccgcccctgtcctttgtagacgtcttctctccaggacgcacgcgcgctgtattcccgccttgtgactaagcgggcgattcctgggagagggttgatgacgcccaagttctggcttcatggcg

SEQ ID NO: 487 - DNA, 252 bp, Panthera pardus
tgagcttccctccgccctatgggaaagggtggccccgccgagcatttataagactcccatacctaaagacatttctcagttatggtgacttcccacaacgcacagcaacatgcaaatatcgaggggtgtaccgcccctgtcctttgtagacgtcttctctccaggacgcacgcgcgctgtattcccgccttgtgactaggcgggcgattcctgggagagggttgatgacgcccaagttctggcttcatggcg

SEQ ID NO: 488 - DNA, 252 bp, Panthera leo
tgagcttccctccgccctatgggaaagtgtggctccgccgagcatttataagactcccatacctaaagacatttctcagttatggtgacttcccacaacgcacagcaacatgcaaatatcgaggggtgtaccgcccctgtcctttgtagacgtcttctctccaggacgcacgcgcgctgtattcccgccttgtgactaggcgggcgattcctgggagagggttgatgacgcccaagttctggcttcatggcg

SEQ ID NO: 489 - DNA, 252 bp, Panthera leo
tgagcttccctccgccctatgggaaagggtggccccaccgagcatttataagactcccatacctaaagacatttctcagttatggtgacttcccacaacgcacagcaacatgcaaatatcgaggggtgtaccgcccctgtcctttgtagacgtcttctctccaggacgcacgcgcgctgtattcccgccttgtgactagccgggcgattcctgggagagggttgatgacgcccaagttctggcttcatggcg

SEQ ID NO: 490 - DNA, 252 bp, Panthera tigris
tgagcttccctccgccctatgggaaagggtggtcccgccgagcatttataagactcccatacctaaagacatttctcagttatggtgacttcccacaacacacagcaacatgcaaatatcgaggggtgtaccgcccctgtcctttgtagacgtcttctctccaggacgcacgcgcgctgtattcccgccttgtgactaggcgggcgattcctgggagagggttgatgacgtccaagttctggcttcatggcg

SEQ ID NO: 491 - DNA, 254 bp, Paradoxurus hermaphroditus
tgagcttccctccgccctatgggaaagaggggctctgctcagcgtttataaggctcccatacctaaagacatttcacagttatggtgacttcccacaagacacagcaacatgcaaatacagaggggtgtaccgccccagtcctttgtagacgccttctcgccaggacgcacgcgcgctatgttcccgccttgtgactctaggcgggcgattcttgggagagggttgatgacgtccaagttctgactccatggcg

SEQ ID NO: 492 - DNA, 254 bp, Hyaena hyaena
tgagcttccctccgccctatgggagagggaggtaccgctgagcgtttataaggctcccatatctaaaggcatttcacagttatggtgacttcccacaacacacagcaacatgcaaatatagagaagcgtaccacccctgtcctttgcaaatgtcttctagccaggacgcacgcgcactgtgttcccgccttgtgactcgaggcgggcgatacctgggagagggttgatgacgtccaagttctgattccatggcg

SEQ ID NO: 493 - DNA, 254 bp, Hyaena hyaena; identical to SEQ ID NO: 492

SEQ ID NO: 494 - DNA, 254 bp, Crocuta crocuta
tgagcttccctccgccctatgggagagggaggttccgctgaacgtttataaggctcccatatctaaagacatttcacagttatggtgacttcccacaacacacagcaacatgcaaatacagagaagcgtaccacccctgtcctttgcagacgtcttctagccaggacgcacgcgcactgtgttcccgccttgtgactcgaggcgggcgatacctgggagagggttgatgacgtccaagttctgactccatggcg

SEQ ID NO: 495 - DNA, 254 bp, Mungos mungo
tgagcttccctccgccctacaggcaaaagaagttcggccgagaatttataaggctccaatacctaaagacatttctcagttacggtgacttcccacaacacacagcaacatgcaaatatcgagaggtgtaccgcccctgtcctttgtagacgtcctctcctcgggacgcacgcgcgctgtgttcccgccttatgactctaggcgggcgattcctgggagagggttgatgacgtccaagttctgactccatggcg

SEQ ID NO: 496 - DNA, 254 bp, Helogale parvula
tgagcttccctccgccctacaggcaaaagcaatccggccgagaatttataaggctccaatacctaaagacatttctcagttacggtgacttcccacaacacacagcaacatgcaaatatcgagaggtgtaccgcccctgtcctttgtagacgtcttctcttcgagacgcacgcgcgctgtgttcccgccttatgactctaggcgggcgattcctgggagagggttgatgacgtccaagttctgactccatggcg

SEQ ID NO: 497 - DNA, 254 bp, Suricata suricatta
tgagcttccctccgccctacaggcaaaagccattcggccgagaatttataaggctccaatacctaaagacatttctcagttacggtgacttcccacaacacacagcaacatgcaaatatcgagaggtgtaccgcccctgtcctttgtagacgtcttctcttcgggacgcacgcgcgctgtgttcccgccttatgactctaggcgggcgattcctgggagagggttgatgacgtccaacttctgactccatggcg

SEQ ID NO: 498 - DNA, 254 bp, Suricata suricatta; identical to SEQ ID NO: 497

SEQ ID NO: 499 - DNA, 254 bp, Cryptoprocta ferox
tgagcttccctccgccctatgaaaaaagacgtctgcacagagcatttataaggctctcacacctaaagacatttctcagttatggtgacttcccacaacacacagcaacatgcaaatatcgagaggtgtaccgcctctgtccttcgtagacgtcttctcgtcaggacgcacgcgcgctgtgttcccgccttatgactccaggcgggcgattcctgggagagggttgatgacgtccaagttctgactccatggcg

SEQ ID NO: 500 - DNA, 252 bp, Ailurus fulgens
tgagcttccctccgccctatgggaaaggctggccccacagagcacttataaggctccataactaaagacatttctcggttgtggtgacttcccacaacgcatagcaacatgcaaatatcgcggggagtacctccccgtcccttgtacgcggcttctcaggacgcacgcacgcgcgctgtgttcccgccctgtgactccaggcgggcaattcccggcagagggttggtgacgggaacgttcaggctccatggc

SEQ ID NO: 501 - DNA, 253 bp, Ursus americanus
tgagcttccctccgccctacgggaaagggttgtcctgaggcggatttataaggctcccacatctaaaggcatttcacagtcatggtgacttcccacaatacatagcaacatgcaaatttcgcggggagtacctcccctgtcccttgtacgcggcttctcaggacgcacgcacgcgctctgtgttcccgccctgtgactctaggagggcaattcctgggacagtgttctgacgggaacgttcaggctccatggc

SEQ ID NO: 502 - DNA, 253 bp, Ursus thibetanus
tgagcttccctccgccctatgggaaaaggtggtcctgaggcggatttataaggctcccatatctaaaggcatttcacagtcatggtgacttcccacaatacatagcaacatgcaaatttcgcggggagtacctcccctgtcccttgtacgcggcttctcaggacgcacgcacgcgctctgtgttcccgccctgtgactctaggagggcaattcctgggacagtgttctgacgggaacgttcaggctccatggc

SEQ ID NO: 503 - DNA, 253 bp, Ursus thibetanus
tgagcttccctccgccctacgggaaagggtggtcctgaagcggatttataaggctcccatatctaaaggcatttcacagtcatggtgacttcccacaatacatagcaacatgcaaatttcgcggggagtacctcccctgtcccttgtacgcggcttctcaggacgcacgcacgcgctctgtgttcccgccctgtgactctaggagggcaattcctgggacagtgttctgacgggaacgttcaggctccatggc

SEQ ID NO: 504 - DNA, 253 bp, Ursus maritimus
tgagcttccctccgccctatggaaaagggtggtcctgaggcggatttataaggctcccacatctaaaggcatttcacagtcatggtgacttcccacaatacatagcaacatgcaaatttcgcggggagtacctcccctgtcccttgtacgaggcttctcaggacgcacgcacgcgctctgtgttcccgccctgtgactctaggagggcaattcctgggacagtgttctgacgggaacgttcaggctccatggc

SEQ ID NO: 505 - DNA, 253 bp, Ursus arctos
tgagcttccctccgccctatgggaaagggtggtcctgaggcggatttataaggctcccacatctaaaggcatttcacagtcatggtgacttcccacaatacatagcaacatgcaaatttcgcggggagtacctcccctgtcccttgtacgaggcttctcaggacgcacgcacgcgctctgtgttcccgccctgtgactctaggagggcaattcctgggacagtgttctgacgggaacgttcaggctccatggc

SEQ ID NO: 506 - DNA, 253 bp, Ailuropoda melanoleuca
tgagcttccctccgccctatagggaaagccgcgcctggggcggatttataaggcttccatatctaaaggcatttcacagtcatggtgacttcccacaatacatagcaacatgcaaatatcgcggggagaacctcccctgtcccttgtacgcggcttctaaagacgcacgcacgcgctctgtgttcccgccctgtgactctaggcgggcaattcctgggacagtgttctgacgggaacgttcaggctccatggc

SEQ ID NO: 507 - DNA, 253 bp, Ailuropoda melanoleuca; identical to SEQ ID NO: 506

SEQ ID NO: 508 - DNA, 253 bp, Taxidea taxus
tgagcttccctccgccctacgagaaagggcggccccagacaacatttataaggctcccgcacctaaaggcattttacagttatggtgacttcccacaacgcgtagcaacatgcaaatatctcggggagtatcgcccctgtcgcttgtacgcgtcttctcaggacgcacgcacgcgcgctgtgttcccgccttgtgactcaaagcgggctattcccgggcgggtttgctgacgggaacgttcaggttccatggc

SEQ ID NO: 509 - DNA, 254 bp, Mirounga angustirostris
tgagcttccctccgccctatggaaaagagtggccccagagagcacttataaggctcccgcacctaaatgcatttatcagttatggtgacttcccacaatacatagcaacatgcaaatatagcggggagtacctcccctgtcccttgtccgtgtcttctcaggacgcacgcacgcgcgctgtgttcccgccctgtgactctaagcgggcaattcctggaagaggcttgctgacgggaacgttcaggctccatggc

SEQ ID NO: 510 - DNA, 254 bp, Mirounga leonina
tgagcttccctccgccctatggaaaagagtggccccagagagcatttataaggctccctcacctaaatgcatttatcagttatggtgacttcccacaatacatagcaacatgcaaatatagcggggagtacctcccctgtcccttgtccgtgtcttctcaggacgcacgcacgcgcgctgtgttcccgccctgtgactctaagcgggcaattcctggaagaggcttgctgacgggaacgttcaggctccatggc

SEQ ID NO: 511 - DNA, 254 bp, Leptonychotes weddellii
tgagcttccctccgccctatggggaagagtggccccagagagcatttataaggctcccgcacctaaatgcatttatcagttatggtgacttcccacaatacatagcaacatgcaaatatagcggggagtacctcccctgtcccttgtacgtgtcttctcaggacgcacgcacgcgggctgtgttcccgccctgtgactctaagcgggcaattcctggaagaggcttgctgacggggacgttcaggctccatggc

SEQ ID NO: 512 - DNA, 254 bp, Neomonachus schauinslandi
tgagcttccctccgccctatggggaagggtggccccagagcgcatttataaggctcccgcacctaaatgcatttatcagttatggtgatttcccacaatacatagcaacatgcaaatatcgcggggagtacctcccctgtcccttgtacgtgtcttctcaggatgcacgcacgcgcgctgtgttcccgccctgtgactctaagcgggcaattcctggaagaggcttgctgacgggaacgttcaggctccatggc

SEQ ID NO: 513 - DNA, 254 bp, Phoca vitulina
tgagcttccctccgccctatgggaaagggtggccccagagagaatttataaggctcccgcacctaaatgcatttatcagttatggtgacttcccacaatacatagcaacatgtaaatatcgcggggagtacctcccctgtcccttgtacgtgtcttctcaggacgcacgcacgcgcgctgtgttcccgccctgtgactctaggcgggcaattcctggaagaggcttgctgacgggaacgttcaggctccatggc

SEQ ID NO: 514 - DNA, 254 bp, Halichoerus grypus
tgagcttccctccgccctatgggaaagggtggccccggagagtatttataaggctcccgcatctaaatgcatttatcagttatggtgacttcccacaatacatagcaacatgtaaatatcgcggggagtacctcccctgtcccttgtacgtgtcttctcaggacgcacgcacgcgcgctgtgttcccgccctgtgactctaggcgggcaattcctggaagaggcttgctgacgggaacgttcaggctccatggc

SEQ ID NO: 515 - DNA, 254 bp, Zalophus californianus
tgagcttccctccgccctatgggaaacggtggccccaaagagcacttataaagccccctcaactaaatgcatttatcagttatggtgacttcccacaatacatagcaacatgcaaatatcgcggggagtacctcccctgtcccttgtacgtgtcatctcaggacgcacgcacgcgcgctgtgttcccgccctgtgactccaggtggacagttcttgggggaggcttgctgacgggaacgttccggctccatggc

SEQ ID NO: 516 - DNA, 254 bp, Zalophus californianus; identical to SEQ ID NO: 515

SEQ ID NO: 517 - DNA, 254 bp, Arctocephalus gazella; identical to SEQ ID NO: 515

SEQ ID NO: 518 - DNA, 254 bp, Arctocephalus gazella; identical to SEQ ID NO: 515

SEQ ID NO: 519 - DNA, 254 bp, Eumetopias jubatus; identical to SEQ ID NO: 515

SEQ ID NO: 520 - DNA, 254 bp, Zalophus californianus; identical to SEQ ID NO: 515

SEQ ID NO: 521 - DNA, 254 bp, Callorhinus ursinus
tgagcttccctccgccctatgggaaacggtggccccaaaaagcacttataaagccccctcacctaaatgcattaatcagttatggtgacttcccacaatacatagcaacatgcaaatatcgcggggagtacctcccctgtcccttgtacgtgtcttctcaggacgcacgcacgcgcgctgtgttcccgccctgtgactctaggtggacaattcctgggggaggcttgctgacgggaacgttccggctccatggc

SEQ ID NO: 522 - DNA, 254 bp, Odobenus rosmarus
tgagcttccctccgccctatgggaaacggtggccccaaagagcatttataaagctccctcaactaaatgcatttatcagttatggtgacttcccacaatacatcgcaacatgcaaacatcgcggggagtacctcccctgtcccttgtacgtgtcttctcaggacgcacgcacgcgcgctgtgttcccgccctgtgactctaggcgggcaattcctagaagacgcttgctgacgggaacgttccggctccatggc

SEQ ID NO: 523 - DNA, 254 bp, Pteronura brasiliensis
tgagcttccctccgccctatgggagaaggtggccccagcaagcatttataaggctcccgcatctaaagacattttacagttatggtgacttcccacaacgcatagcaatatgcaaatatagcagggagtaccgcccctgtcccttgtacgcgtcttctcaggacgcacgcacgcgcgctgtgttcccgccctgtgactccaggcgggtatttcctggggcgggtttgctgacaagaacgttcaggctccatggc

SEQ ID NO: 524 - DNA, 254 bp, Neogale vison
tgagcttccctccgccctatgggaaagggtggccccagcgagcatttataaggctcccgcatctaaagacattttacagttatggtgacttcccacaacgcgtagcaacatgcaaatatcgcggggagtaccgcccctgtcccttgcacgcgtcttctcagcacgcacgcacgcgcgctgtgttcccgccctgtgactccaggcgggtattgcccggggcgggtttgccgacaggaacgttcaggctccatggc

SEQ ID NO: 525 - DNA, 254 bp, Lontra canadensis
tgagcttccctccgccctatgggaaagggtggccccagcgagcatttataaggctcccgcatctaaagacattttacagttatggtgacttcccacaacgcgtagcaacatgcaaatatcgcagggagtaccgcccctgtcccttgtacgcgtcttctcagcacgcacgcacgcgcgctgtgttcccgccctgtgactccaggcgggtatttcccggggcgggtttgctgacaagaacgttcaggcgccatggc

SEQ ID NO: 526 - DNA, 254 bp, Lutra lutra
tgagcttccctccgccctatgggaaagggtgggcccagcgagcatttataaggctcctgcatctaaagacattttacaattatggtgacttcccacaacgcgtagcaacatgcaaatatcgcagggagtaccgcccctgtcccttgtacgcgtcttctcagcacgcacgcacgcgcgctgtgttcccgccctgtgactccaggcgggtatttcccggggcgggtttgctgacaagaactttcaggctccatggc

SEQ ID NO: 527 - DNA, 254 bp, Lutra lutra; identical to SEQ ID NO: 526

SEQ ID NO: 528 - DNA, 253 bp, Enhydra lutris
tgagcttccctccgccctatgggaaagggtggacctagcgagcatttataaggctcccgcatctaaagacattttacaattatggtgacttcccacaacgcgtagcaacatgcaaatatcgcaggagtaccgcccctgtcccttgtacgcgtcttctcagcacgcacgcacgcgcgctgtgttcccgccctgtgactccaggcgggtatttcccggggcgggtttgctgccaagaacgttcaggctccatggc

SEQ ID NO: 529 - DNA, 253 bp, Enhydra lutris; identical to SEQ ID NO: 528

SEQ ID NO: 530 - DNA, 254 bp, Martes zibellina
tgagcttccctccgccctatgggaaagggtggccccagagagcatttataaggctcccgcgcctaaaggcatttaacagttatggtgacttcccacaacgcgtagcaacatgcaaatatcgcagggagtaccgcccctgtcccttgtacgcatcttttcaggacgcacgcacgcgcgctgtgttcccgccctgtgactccaggcgggcatttcccggggcgggtttgctgacaggaacgtccaggctccatggc

SEQ ID NO: 531 - DNA, 254 bp, Gulo gulo
tgagcttccctccgccctatgggaaagggtggacccagagcgcatttataaggctcccgcacctaaacgcatttaacagttatggtgacttcccacaacgcgtagcaacatgcaaatatcgcagggagtaccgcccctgtcccttgtacgcatcttctcaggacgcacgcacgcgcgctgtgttcccgccctgtgactccaggcgggcatttcccggggcgggtttgctgacaggaacgttcaggctccatggc

SEQ ID NO: 532 - DNA, 254 bp, Mustela erminea
tgagcttccctccgccctatgggaaacggtggccccaccgagcatttataaggctcccgcatctaaagacattttacaattatggtgacttcccacaacgcgtagcaacatgcaaatatcgcggagagtaccgcccctgtcccaagcacgcgtcttctcagcacgcacgcacgcgcgctatgttcccgccctgtgactccaggcgggtatttccaggggcgggtttgctgacaggagcgttcaggcttcatggc

SEQ ID NO: 533 - DNA, 254 bp, Mustela erminea; identical to SEQ ID NO: 532

SEQ ID NO: 534 - DNA, 255 bp, Mustela putorius
tgagcttccctccgccctatggggaaagggtggacccaccgagcatttataaggctcccgcatctaaagacattttacagttatggtgacttcccacaacgcgtagcaacatgcaaatatcgtggagagtaccgcccctgtcccatgcacgcgtcttctcagcacgcacgcacgcgcgctgtgttcccgccctgtgactccaggcgggtatttccaggggcgggtttgctgacaggaacgttcaggcttcatggc

SEQ ID NO: 535 - DNA, 254 bp, Mustela putorius
tgagcttccctccgccctatgggaaagggtggacccaccgagcatttataaggctcccgcatctaaagacattttacagttatggtgacttcccacaacgcgtagcaacatgcaaatatcgtggagagtaccgcccctgtcccatgcacgcgtcttctcagcacgcacgcacgcgcgctgtgttcccgccctgtgactccaggcgggtatttccaggggcgggtttgctgacaggaacgttcaggcttcatggc

SEQ ID NO: 536 - DNA, 254 bp, Mustela putorius; identical to SEQ ID NO: 535

SEQ ID NO: 537 - DNA, 254 bp, Mustela putorius; identical to SEQ ID NO: 535

SEQ ID NO: 538 - DNA, 254 bp, Mustela putorius; identical to SEQ ID NO: 535

SEQ ID NO: 539 - DNA, 254 bp, Mustela putorius; identical to SEQ ID NO: 535

SEQ ID NO: 540 - DNA, 254 bp, Mustela putorius; identical to SEQ ID NO: 535

SEQ ID NO: 541 - DNA, 254 bp, Mustela putorius; identical to SEQ ID NO: 535

SEQ ID NO: 542 - DNA, 254 bp, Mustela putorius; identical to SEQ ID NO: 535

SEQ ID NO: 543 - DNA, 254 bp, Mustela putorius; identical to SEQ ID NO: 535

SEQ ID NO: 544 - DNA, 254 bp, Mustela putorius; identical to SEQ ID NO: 535

SEQ ID NO: 545 - DNA, 254 bp, Mustela putorius; identical to SEQ ID NO: 535

SEQ ID NO: 546 - DNA, 254 bp, Mustela putorius; identical to SEQ ID NO: 535

SEQ ID NO: 547 - DNA, 254 bp, Mustela putorius; identical to SEQ ID NO: 535

SEQ ID NO: 548 - DNA, 254 bp, Mustela putorius; identical to SEQ ID NO: 535

SEQ ID NO: 549 - DNA, 255 bp, Mustela putorius
tgagcttccctccgccctatgggaaagggtggacccaccgagcatttataaggctcccgcatctaaagacattttacagttatggtgacttcccacaacgcgtagcaacatgcaaatatcgtggagagtaccgcccctgtcccatgcacgcgtcttctcagcacgcacgcacgcgcgctgtgttccccgccctgtgactccaggcgggtatttccaggggcgggtttgctgacaggaacgttcaggcttcatggc

SEQ ID NO: 550 - DNA, 255 bp, Mustela putorius
tgagcttccctccgccctatgggaaagggtggacccaccgagcatttataaggctcccgcatctaaagacattttacagttatggtgacttcccacaacgcgtagcaacatgcaaatatcgtggagagtaccgcccctgtcccatgcacgcgtctttctcagcacgcacgcacgcgcgctgtgttcccgccctgtgactccaggcgggtatttccaggggcgggtttgctgacaggaacgttcaggcttcatggc

SEQ ID NO: 551 - DNA, 252 bp, Mustela putorius
tgagcttccctccgccctatgggaaagggtggacccaccgagcatttataaggctcccgcatctaaagacattttacagttatggtgacttcccacaacgcgtagcaacatgcaaatatcgtggagagtaccgcccctgtcccatgcacgcgtcttctcagcacgcacgcacgcgctgtgttcccgccctgtgactccaggcgggtatttccaggggcgggtttgctgacaggaacgttcaggcttcatggc

SEQ ID NO: 552 - DNA, 252 bp, Mustela putorius; identical to SEQ ID NO: 551

SEQ ID NO: 553 - DNA, 253 bp, Mustela putorius
tgagcttccctccgccctatgggaaagggtggacccaccgagcatttataaggctccgcatctaaagacattttacagttatggtgacttcccacaacgcgtagcaacatgcaaatatcgtggagagtaccgcccctgtcccatgcacgcgtcttctcagcacgcacgcacgcgcgctgtgttcccgccctgtgactccaggcgggtatttccaggggcgggtttgctgacaggaacgttcaggcttcatggc

SEQ ID NO: 554 - DNA, 253 bp, Mustela putorius; identical to SEQ ID NO: 553

SEQ ID NO: 555 - DNA, 254 bp, Mustela putorius
tgagcttccctccgccctatgggaaagggtggacccaccgagcatttataaggctcccgcatctaaagacattttacagttatggtgacttcccacaacgcgtagcaacatgcaaatatcgtggagagtaccgcccctgtcccatgcacgcgtcttctcagcacgcacgcacgcacgtgtgttccccgccctgtgactccaggcgggtatttccaggggcgggtttgctgacaggaacgttcaggcttcatggc

SEQ ID NO: 556 - DNA, 250 bp, Mustela putorius
tgagcttccctccgccctatgggaaagggtggacccaccgagcatttataaggctccgcatctaaagacattttacagttatggtgacttcccacaacgcgtagcaacatgcaaatatcgtggagagtaccgcccctgtcccatgcacgcgtcttctcagcacgcacgcacgcgctgtgttcccgccctgtgactccaggcgggtatttccagggcgggtttgctgacaggaacgttcaggcttcatggc

SEQ ID NO: 557 - DNA, 254 bp, Mellivora capensis
tgagcttccctccgccctatgggaaagggtggcgccagagaccacttataaggctcccccacctgaaggcattttacagttatggtgacttcccacaatgcgtagcaacatgcaaatatcgcagggagtaccgcccctgtctcttgtaagcgtcgtctcagggcgcacgcacgcgcgctgtgttcccgccctgtgactccaggcgggcatttcccggggcggttttgctgacaggaacgttcaggctccatggc

SEQ ID NO: 558 - DNA, 254 bp, Potos flavus
tgagcttccctccgcccgatgaaagagggtggttccacagagcatttataaggctcccatacctaaagacatttgtcagttatggtgacttcccacaaagcatagcaacatgcaaatatcgcggggagcaccgcccctgtcccttatccgcgtcttcttaggacgcacgcacgcgcgctgtgttcccgccctgtgactccaggcgggcaattctcgggagggggttgctgacggcaacgttcaggctccatggc

SEQ ID NO: 559 - DNA, 259 bp, Artificial Sequence
  Description of Artificial Sequence: Synthetic polynucleotide
tgagcttccctccgccctatggggaaagggtggmcccrsmgagcatttataaggctcccryayctaaagrcatttywcagttatggtgacttcccacaaayrcryagcaacatgcaaatatcghggrgwgtacckcccctgtccywtgyasrcgtctttctcwssasgcacgcacgcgcgctgtgttccccgccytgtgactcyaggcgggyrwttccwgggrsrggkttgmtgacrksmamgttcwggctycatggcg

SEQ ID NO: 560 - DNA, 259 bp, Artificial Sequence
  Description of Artificial Sequence: Synthetic polynucleotide
tgagcttccctccgccctatggggaaavggygghycyrvmgagsatttataagrctcccryayctaaakrcattthwcagttatggtgacttcccacaaayrcryagcaacatgcaaatatcghggrgwgtacckcccctgtccywtgyasrygtctttctcwssasgcacgcacgcgcgctgtrttccccgccytgtgactcyaggcgggyrwttcchgggrsrggbttgmtgacrksmamgttcwggctycatggcg

SEQ ID NO: 561 - DNA, 259 bp, Artificial Sequence
  Description of Artificial Sequence: Synthetic polynucleotide
tgagcttccctccgccctayggggaaavrgygghycyrvvgmgsayttataagrctcccdyayctaaakrcattthwcagttatggtgayttcccacaaayrcryagcaacatgcaaatatmghrgrgwgtacckcccctgtccywtgyasrygkctttctcwssasgcacgcacgcgckctgtrttccccgccytgtgactcyaggygggyrwttcyhgggrsrggbttgmtgacrdsmamgttcwgrctycatggcg

SEQ ID NO: 562 - DNA, 259 bp, Artificial Sequence
  Description of Artificial Sequence: Synthetic polynucleotide
  modified_base (34)..(34): a, c, t, or g
tgagcttccctccgccctaygrrrvravrghvrnycyrvvgmgvayttataarrcyccmdyahctaaakrcattthwcartyayggtgayttcccacaaayrcryagcaacatgcaaatwtmghrrrgwgtacckcccctgtccywtgyasrygkctwtctmdbsrsgcacgcacgcgckctgtrttccccgccytrtgactcyarghggryrdttcyhggrrsrgkbttgmtgacrdsmamgttchgrctycatggcg

SEQ ID NO: 563 - DNA, 259 bp, Artificial Sequence
  Description of Artificial Sequence: Synthetic polynucleotide
  modified_base (31)..(35): a, c, t, or g
  modified_base (40)..(40): a, c, t, or g
  modified_base (44)..(44): a, c, t, or g
  modified_base (60)..(60): a, c, t, or g
  modified_base (76)..(76): a, c, t, or g
  modified_base (101)..(101): a, c, t, or g
  modified_base (158)..(158): a, c, t, or g
  modified_base (163)..(164): a, c, t, or g
  modified_base (167)..(167): a, c, t, or g
  modified_base (204)..(204): a, c, t, or g
  modified_base (238)..(238): a, c, t, or g
tgagcttccctccgccckaygrvrvravdvnnnnnbbrvnvmvnryttataarrcyyyhnyrhstrawbvcattwnwcrrtyryggtgayttcccdcaaanrcrymgcaayatgyaaaywymkhrrrghghryydccycdrtcbywhvymvrhrbctntythnnsrngcacgcacgcrsdctryrttccccgccytrtgactcnrrshrgryddtdcyhrgvrsrvkbttgvygmcrnsvrvbtychgrykycatggcg

SEQ ID NO: 564 - DNA, 259 bp, Artificial Sequence; identical to SEQ ID NO: 563
  Description of Artificial Sequence: Synthetic polynucleotide
  modified_base (31)..(35): a, c, t, or g
  modified_base (40)..(40): a, c, t, or g
  modified_base (44)..(44): a, c, t, or g
  modified_base (60)..(60): a, c, t, or g
  modified_base (76)..(76): a, c, t, or g
  modified_base (101)..(101): a, c, t, or g
  modified_base (158)..(158): a, c, t, or g
  modified_base (163)..(164): a, c, t, or g
  modified_base (167)..(167): a, c, t, or g
  modified_base (204)..(204): a, c, t, or g
  modified_base (238)..(238): a, c, t, or g

SEQ ID NO: 565 - DNA, 243 bp, Balaenoptera bonaerensis; identical to SEQ ID NO: 390

SEQ ID NO: 566 - DNA, 243 bp, Eschrichtius robustus; identical to SEQ ID NO: 391

SEQ ID NO: 567 - DNA, 243 bp, Eschrichtius robustus; identical to SEQ ID NO: 391

SEQ ID NO: 568 - DNA, 243 bp, Eschrichtius robustus; identical to SEQ ID NO: 393

SEQ ID NO: 569 - DNA, 243 bp, Megaptera novaeangliae; identical to SEQ ID NO: 394

SEQ ID NO: 570 - DNA, 243 bp, Balaenoptera musculus; identical to SEQ ID NO: 395

SEQ ID NO: 571 - DNA, 243 bp, Balaenoptera musculus; identical to SEQ ID NO: 396

SEQ ID NO: 572 - DNA, 240 bp, Balaenoptera physalus; identical to SEQ ID NO: 397

SEQ ID NO: 573 - DNA, 241 bp, Eubalaena japonica; identical to SEQ ID NO: 398

SEQ ID NO: 574 - DNA, 245 bp, Balaenoptera acutorostrata; identical to SEQ ID NO: 399

SEQ ID NO: 575 - DNA, 243 bp, Platanista minor; identical to SEQ ID NO: 400

SEQ ID NO: 576 - DNA, 243 bp, Phocoena phocoena; identical to SEQ ID NO: 401

SEQ ID NO: 577 - DNA, 243 bp, Neophocaena asiaeorientalis; identical to SEQ ID NO: 402

SEQ ID NO: 578 - DNA, 243 bp, Phocoena sinus; identical to SEQ ID NO: 403

SEQ ID NO: 579 - DNA, 243 bp, Monodon monoceros; identical to SEQ ID NO: 404

SEQ ID NO: 580 - DNA, 243 bp, Monodon monoceros; identical to SEQ ID NO: 405

SEQ ID NO: 581 - DNA, 243 bp, Monodon monoceros; identical to SEQ ID NO: 405

SEQ ID NO: 582 - DNA, 243 bp, Monodon monoceros; identical to SEQ ID NO: 405

SEQ ID NO: 583 - DNA, 243 bp, Delphinapterus leucas; identical to SEQ ID NO: 408

SEQ ID NO: 584 - DNA, 243 bp, Delphinapterus leucas; identical to SEQ ID NO: 408

SEQ ID NO: 585 - DNA, 243 bp, Delphinapterus leucas; identical to SEQ ID NO: 408

SEQ ID NO: 586 - DNA, 243 bp, Tursiops aduncus; identical to SEQ ID NO: 411

SEQ ID NO: 587 - DNA, 243 bp, Tursiops aduncus; identical to SEQ ID NO: 411

SEQ ID NO: 588 - DNA, 243 bp, Tursiops truncatus; identical to SEQ ID NO: 411

SEQ ID NO: 589 - DNA, 243 bp, Tursiops truncatus; identical to SEQ ID NO: 414

SEQ ID NO: 590 - DNA, 243 bp, Tursiops truncatus; identical to SEQ ID NO: 414

SEQ ID NO: 591 - DNA, 243 bp, Tursiops truncatus; identical to SEQ ID NO: 414

SEQ ID NO: 592 - DNA, 243 bp, Tursiops truncatus; identical to SEQ ID NO: 414

SEQ ID NO: 593 - DNA, 243 bp, Tursiops truncatus; identical to SEQ ID NO: 414

SEQ ID NO: 594 - DNA, 243 bp, Sousa chinensis; identical to SEQ ID NO: 420

SEQ ID NO: 595 - DNA, 243 bp, Sousa chinensis; identical to SEQ ID NO: 420

SEQ ID NO: 596 - DNA, 243 bp, Lagenorhynchus obliquidens; identical to SEQ ID NO: 422

SEQ ID NO: 597 - DNA, 243 bp, Globicephala melas; identical to SEQ ID NO: 423

SEQ ID NO: 598 - DNA, 243 bp, Orcinus orca; identical to SEQ ID NO: 424

SEQ ID NO: 599 - DNA, 243 bp, Lipotes vexillifer; identical to SEQ ID NO: 425

SEQ ID NO: 600 - DNA, 243 bp, Inia geoffrensis; identical to SEQ ID NO: 426

SEQ ID NO: 601 - DNA, 242 bp, Pontoporia blainvillei; identical to SEQ ID NO: 427

SEQ ID NO: 602 - DNA, 242 bp, Pontoporia blainvillei; identical to SEQ ID NO: 427

SEQ ID NO: 603 - DNA, 243 bp, Kogia breviceps; identical to SEQ ID NO: 429

SEQ ID NO: 604 - DNA, 242 bp, Physeter catodon; identical to SEQ ID NO: 430

SEQ ID NO: 605 - DNA, 242 bp, Physeter catodon; identical to SEQ ID NO: 430

SEQ ID NO: 606 - DNA, 242 bp, Physeter catodon; identical to SEQ ID NO: 430

SEQ ID NO: 607 - DNA, 242 bp, Mesoplodon bidens; identical to SEQ ID NO: 433

SEQ ID NO: 608 - DNA, 242 bp, Ziphius cavirostris; identical to SEQ ID NO: 434

SEQ ID NO: 609 - DNA, 243 bp, Artificial Sequence
  Description of Artificial Sequence: Synthetic polynucleotide
tgagcttccckccgccctaygccgaaaryywrgctcaasccrcatttataaggctcccaaayctaarkacatttgtcggttatggtgacttcccgcaacacattgcgacatgcaaatactgcggagcgtwcctcccctggcaactcctcgctgggacgcacgcgcgctacgtgctcccgccttttgactgcgccggcgatacttgggagagggttgatgacgtcagcgttctggctccatggc

SEQ ID NO: 610 - DNA, 243 bp, Artificial Sequence
  Description of Artificial Sequence: Synthetic polynucleotide
  modified_base (29)..(29): a, c, t, or g
tgagcttccckccgccctayrcygaaarnywrsytcaassyrcatttataargctcscaaayckaarkacatttgtcggttatggtgacttcccgcamcacattgcgacatgcaaatactgcggagygyhcctcccctggcaactcctcgctgggacgcacgcgcrctrcgtgctcccgccttttgactgcgccggcgatacttgggagagggttgatgacgtcagcgttctggctccatggc

SEQ ID NO: 611 - DNA, 243 bp, Artificial Sequence
  Description of Artificial Sequence: Synthetic polynucleotide
  modified_base (29)..(29): a, c, t, or g
tgagcttcccdccgccctayrmyraaarnydrsykcaavsyrcatttataargctcscaarbckaarkacatttgtmggttatggtgacttcccgcamcacattgcgacatgcaaatactgcggagygyhcctcccctggcaactcctcgctgggacgcacgcgcrctrcgtgctcccgccttttgactgcgccggcgatacttgggagagggttgatgacgtcagcgttctggctccatggc

SEQ ID NO: 612 - DNA, 243 bp, Artificial Sequence
  Description of Artificial Sequence: Synthetic polynucleotide
  modified_base (29)..(29): a, c, t, or g
  modified_base (45)..(45): a, c, t, or g
tgagcttcccdccgccctayrhbraaarnbdvvykyvvvbyrymnttataargctcbcaarbckaarkrcatttswmgsttatggtgacttcccgyamcacattgcgacatgcaaatactgcggagygyhcctccccwggcaactcctcgctgggacgcamgcgcrctrcgtgctcccgcctttkgactgmgccggcgayacytgggagagrgttgatgacgtcagcgttctggctccatggc

SEQ ID NO: 613 - DNA, 246 bp, Artificial Sequence
  Description of Artificial Sequence: Synthetic polynucleotide
  modified_base (22)..(22): a, c, t, or g
  modified_base (29)..(29): a, c, t, or g
  modified_base (31)..(33): a, c, t, or g
  modified_base (39)..(41): a, c, t, or g
  modified_base (45)..(45): a, c, t, or g
  modified_base (79)..(79): a, c, t, or g
  modified_base (118)..(119): a, c, t, or g
  modified_base (131)..(133): a, c, t, or g
tgagcttcycdccgccctrydnbvrarvnbnnnbkyvvnnnryvnttataargctcbcamvbckaarkryatttshmvnttatggtgacttcccgyamcrcattgcgacatgcaaatnntgmggagygyhnnnccycyycwrrmaactcctmgcygggacgcamgcgyrytdcrtsmtcccgcctytkgrcygmrcssgcgryrcytgggakarrgttgatgacrycascrttctggctccatggc

SEQ ID NO: 614 - DNA, 246 bp, Artificial Sequence; identical to SEQ ID NO: 613
  Description of Artificial Sequence: Synthetic polynucleotide
  modified_base (22)..(22): a, c, t, or g
  modified_base (29)..(29): a, c, t, or g
  modified_base (31)..(33): a, c, t, or g
  modified_base (39)..(41): a, c, t, or g
  modified_base (45)..(45): a, c, t, or g
  modified_base (79)..(79): a, c, t, or g
  modified_base (118)..(119): a, c, t, or g
  modified_base (131)..(133): a, c, t, or g

SEQ ID NO: 615 - DNA, 244 bp, Megaderma lyra
tgagcttccctccgccctatgggaagtaagagattcacgccggttatataagattcctgtaactaaagaaatttcaaggatagggtgacttcccacaatacaaagcgacatgcaaatatcgcggggcgtgcctgtcctgacctttgtgagactcttcgctaggacgcaggcgtgctgcgagttcccgccttatcggcgaggcctgggggagagttgatcacgccaacattcgggctccatggcg

SEQ ID NO: 616 - DNA, 244 bp, Megaderma lyra
tgagcttccctccgccctatgggaagtaagaggttcacgccggttatataagattcctgtaactaaagaaatttcaaggatagggtgacttcccacaatacaaagcgacatgcaaatatcgcggggcgtgcctgtcctgacctttgtgagactcttctctaggacgcaggcgtgctgcgagttcccgccttatcggcgggtactggggaagagttgatgacgccaacattcgggctccatggcg

SEQ ID NO: 617 - DNA, 252 bp, Rhinolophus ferrumequinum
tgagcttccctccgccctacgcgtaaaataccctgctcgcagattatataagactcctgtacctaaagacatttcaagggtagggtgacttcccacaacacatagcgacatgcaaatagagggtgtgtctcccctggcccctgtgggcgtcttctcgctaggacgcacgcgcgctgcgttttcccgccttctggctttaggtctgcgagtcccgggaaaggattgattacgtcaacattcgggcttcatggc

SEQ ID NO: 618 - DNA, 252 bp, Rhinolophus ferrumequinum; identical to SEQ ID NO: 617

SEQ ID NO: 619 - DNA, 252 bp, Rhinolophus ferrumequinum
tgagcttccctccgccctacgcgtaaaatacgctgctcgcagattatataagactcctgtacctaaagacatttcaagggtagggtgacttcccacaacacatagcgacatgcaaatagagggtgtgtctcccctggcccctgtgggcgtcttctcgctaggacgcacgcgcgctgcgttttcccgccttctggctttaggtctgcgagtcccgggaaaggattgattacgtcaacattcgggcttcatggc

SEQ ID NO: 620 - DNA, 252 bp, Rhinolophus ferrumequinum
tgagcttccctccgccctacgcgtaaaatacgctgctcgcagattatataagactcctgtacctaaagacatttcaagggtagggtgacttcccacaacacatagcgacatgcaaatagagggtgtgtctcccctggcccctgtgggcgtcttctcgctaggacgcacgcgcgctgcgttttcccgccttctggctttaggtcggcgagtcccgggaaaggattgattacgtcaacattcgggcttcatggc

SEQ ID NO: 621 - DNA, 252 bp, Rhinolophus sinicus
tgagcttccctccgccctatgcgtaaaacttttcttccacagattatataaggttcctgaacctaaagacatttcaagagtagggtgacttcccacaacacatagcgacatgcaaatgtagggtgtgtctcccctggcccttgtgggcgtcttctcgctaggacgcacgcgcgctgccttttcccggcttctggctctagatctgcgagtccggggaaaggatcgattacgtcaacattcgggcgtcatggc

SEQ ID NO: 622 - DNA, 252 bp, Hipposideros galeritus
tgagcttccctccgccctatgcgtaaaaaggagttcacggcgactatataaggttcccgtacgtagtgacatttcaagattatggtgacttcccacaatacatagcgacatgcaaataaagggtgtgttctcgtctgtcccccctgtgggcgtcttcttgctaggacgcacgcgcgctgcgttttcccgccttgtgattctgggcaagtcctgggaaaggattgattacgtcaacattcgggcttcatggcg

SEQ ID NO: 623 - DNA, 255 bp, Hipposideros armiger
tgagcttccctccgccctacgcgtaaaacaggcttaacggtgactatataaggttcctgtacctaatgacatttcaagattagggtgacttcccacaatacatagcgacatgcaaataagggggggtttccggtcggtcccccgtgggcgtcttcttgatagaacgcacgcgcgctgcgttttcccgccttgtgattctgggatcggcaagtcctgggaaaggattggttacgtcaacattcgggcttcatggcg

SEQ ID NO: 624 - DNA, 261 bp, Eonycteris spelaea
tgagcttccctccgccctatgagaaaacgaacaactcggagaatatataaggctcccatatctgaaggcattttaagaatagggtgatttcccacaatacatagcgatatgtaaatgtagtgggacatgccttccctgtcccttgtgggcagcttctcgccaggacgcacgcgcgctgcgtgttcccgccttgtgactaaattggcgagtctgggaggagactgatgatgtcagcatcatcaactttcccgctccatggcg

SEQ ID NO: 625 - DNA, 261 bp, Rousettus aegyptiacus
tgagcttcctccgccctatgagggaagactgtcgtagggagaatatataaggctcccatatcgctagacattttaagatgagggtgatttcccacaatgcatagcgacatgtaaatgaagcgaggcatgctttccctgtcccttgtgggcagcttctcgccaggacgcacgcgcgctgcgtgttcccgccttgtgactaaattggcgagtctgggaggagactgatgatgtcagcatcatcaacttttctgctccatggcg

SEQ ID NO: 626 - DNA, 261 bp, Rousettus aegyptiacus; identical to SEQ ID NO: 625

SEQ ID NO: 627 - DNA, 261 bp, Rousettus aegyptiacus; identical to SEQ ID NO: 625

SEQ ID NO: 628 - DNA, 261 bp, Rousettus aegyptiacus; identical to SEQ ID NO: 625

SEQ ID NO: 629 - DNA, 262 bp, Rousettus leschenaultii
tgagcttccctccgccctatgagggaagactgtcgtagggagaatatataaggctcccatatcgctagacattttaagatgagggtgatttcccacaatgcatagcgacatgtaaatgaagtggggcatgctttccctgtcctttgtgggcagcttctcgccaggacgcacgcgcgctgcgtgtttccgccttgtgactaaattggcgagtctgggaggagactgatgatgtcagcatcatcaactttcccgctccatggcg

SEQ ID NO: 630 - DNA, 262 bp, Pteropus pselaphon
tgagcttccctccgccctacgcgagaagaattcttcacgcagaatatataaggatcccatatctgaagacattttacgattacggtgatttcccacaacacatagcgacatgtaaatgtagtggggcatgcctcccctgtcccttgtgggcagcttctcgccagaacgcacgcgcggtgcgtgttcccgccttgtgactaagttggcgagtcagggaggagattgatgatgtcatcatcgtcagctcacccgctccatggcg

SEQ ID NO: 631 - DNA, 262 bp, Pteropus vampyrus
tgagcttccctccgccctaagcgagaaaaactcttcaagcagaatatataaggatcccatatctgaagacattttacgattacggtgatttcccacaacacatagcgacatgtaaatgtagtggggcatgcctcccctgtcccttgtgggcagcttctcgccagaacgcacgcgcggtgcgtgttcccgccttgtgactaagttggcgagtcagggaggagattgatgatgtcatcatcgtcagctcacccgctccatggcg

SEQ ID NO: 632 - DNA, 263 bp, Pteropus giganteus
tgagcttccctccgccctacgcgagaaaaattcttcacgcagaatatataaggattcccatatctgaagacattttacgatgacggtgatttcccacaacacatagcgacatgtaaatgtagtggggcatgcctcccctgtcccttgtgggcagcttctcgccagaacgcacgcgcggtgcgtgttcccgccttgtgactaagttggcgagtcagggaggagattgatgatgtcatcatcgtcagctcacccgctccatggcg

SEQ ID NO: 633 - DNA, 262 bp, Pteropus alecto
tgagcttccctccgccctacgagagaaaaagcctgcacgcagaatatataaggatcccatatctgaagacattttacggttacggtgatttcccacaacacatagcgacatgtaaatatagtggggcatgcctctcctgtcccttgtgggcagcttctcgccagaacgcacgcgcggtgcgtgttcccgccttgtgactaagttggcgagtcagggaggagattgatgatgtcatcatcgtcagctcacccgctccatggcg

SEQ ID NO: 634 - DNA, 262 bp, Macroglossus sobrinus
tgagcttccctccgccctatgagaaaacatcttctcatgtgcaatatataaggctcccatgtctaaagacattttaaggttagggtgatttcccacaatacacagcgacatgtaaatgtactggagcttgcctcccctatcccttgagggtggtttctcgacaggacgcacgcgcgctgcgtgttcccgcctagttactaaattggcgagtctgggaagagattgatgacgtcaatatcatcaactttcccgctccatggcg

SEQ ID NO: 635 - DNA, 219 bp, Cynopterus brachyotis
tgagcttccctccgccctatgaggaaagccggccttgcggagactatataaggctcccccatctgaggacattttaacgctagggtgatttcccacaaggcacagcgacatgcaaatacagtgggcgtgcctcccctgcgccttcccgcctcgtggctgaactggcgagtcggggaggggggtgatgacgtcacatcgtccgctttcccgctccatggc

SEQ ID NO: 636 - DNA, 255 bp, Pteronotus parnellii
tgagcttccctccgcccttcagaaaagctgctctttctgctgaaaaatatatgagccccataccttaaggcctttatcggttagggtgacttcccacaatacatggcaacatgcaaatatagaagggcgtgccttcagtgtccggagcaggcaccgtctcgccgggacgcgcgcactgcgtgttcttgctttttgactctaggcgggcgactcttgggagagggttgttgacgtcaacattcacgctccatggcg

SEQ ID NO: 637 - DNA, 253 bp, Tonatia saurophila
tgagcttccctccgccctataagagattaccgattcctgctggagaatatatgaggcccactcttcgagaccttttatggttacggtaacttcccataacacatagcgacatgcaaatatcgtgggatgtgcctccgtggtcccttgcggaaaccatcttgcccatcagcacgctaggtattcccgccttctgactctaggcgggcgaatcccaggagagggttgttgacgtccacattcgggcaccatggcg

SEQ ID NO: 638 - DNA, 251 bp, Phyllostomus discolor
tgagcttccctccgccctacgggagaaagctaagccgtgttggaaaatatatgaggcccactcttcaagaccttttatgattatggtaatttcccatgacacatagcgacatgcaaatacagtgggtggtgcctgcacggtccttgcggacaacctcttgcccgtgagcgcgccgggtattcccgccttctgactctaggcggggaatcctaggagagggttgttgacgtagacatttgggcaccatggcg

SEQ ID NO: 639 - DNA, 251 bp, Phyllostomus discolor
tgagcttccctccgccctacgggagaaagctaggccgtgttggaaaatatatgaggcccactcttcaagaccttttatgattatggtaatttcccatgacacatagcgacatgcaaatacagtgggtggtgcctgcacggtccttgcggacaacctcctgcccgtgagcgcgccgggtattcccgccttctgactctaggcggggaatcctaggagagggttgttgacgtagacatttgggcacaatggcg

SEQ ID NO: 640 - DNA, 252 bp, Micronycteris hirsuta
tgagcttccctccgccctacaagggcaacagtaggcgtggtggaaaatatatgaggcccattgctaaggatcttttatggttagggtgatttcccacaatacatagcgacatgcaaatatagtgagtgtgcttccactgtcctttgcggacaccgtctcgcccgtaagcgcactgggtattcccgccttttgactctaggcgggcaaatcctgggagagggttgttgacgtcaacattcgggctccatggcg

SEQ ID NO: 641 - DNA, 255 bp, Macrotus californicus
tgagcttccctccgccctatggaagggaagtttgtaatgctggaaaatatatgagaccaactcctaaggaccttttacagttagggtgacttcccacaacacatagcgacatgcaaataccacgaggcgtgcttccactgtcctttgcggacaccgtctcgcccgtcagcgggcgctgtgtattcccgccttttgactctagacgggcgaatcctgggagagggttgttgacgtcaacattcgggctctatggcg

SEQ ID NO: 642 - DNA, 253 bp, Anoura caudifer
tgagcttccctccgccctacggaagagaagcctcctctgatggaaaatatatgagacccattcctcaagaccttttttggtgacggtgacttcccacaacacacagcgacatgcaaatgtcgtggggtgtgcctccacagtcacgcgcggacgccgtcttgcccttgcgcgcgctgtgcattcccgcctcttgactctaggccgacgaatcctgggagagggctgttgacgacgacattcgggctccatggcg

SEQ ID NO: 643 - DNA, 252 bp, Artibeus jamaicensis
tgagcttccctccgccctacgaggaaataagcaaccctggtggcaaatataggaagcccattcctcaagaccttttaagcttacggtgacttcccacaatacatagcaacatgcaaatattgtggggtgtgccttcaccgtcctttgaggtcacagtcttgcccataagcgcgctgtgtaatcccgccttttgacgttaggcaggcgaatcctgggagagggttgctgacgtcgacattcggctccatggcg

SEQ ID NO: 644 - DNA, 252 bp, Artibeus jamaicensis
tgagcttccctccgccctacgaggaaataatctcccctggtggcaaatataggaagcccattcctcaagaccttttaaggttacggtgacttcccacaatacatagcaacatgcaaatattgtggggtgtgccttcactgtcctttgcggttactatcttgcccttaagcgcgctgtataatcccgccttttgacgttaggcaggcgaatcctgggagagggttgcttacgtcgacactcggctccatggcg

SEQ ID NO: 645 - DNA, 252 bp, Sturnira hondurensis
tgagcttccctccgccctataaggaagctcaactttgcggtgggaattatatgaggcccatttctcaagaccttttgccattatggtgacttcccacaatacatagcaatatgcaaaaatagtagggtgtgcctccactgtcctttgcggaccctgtcgctgtcgtaagcgcgctgtgtgatcccgccttttgactctaggcgggcgaatcctgggagagggttgttgacgtcgacattcggctccatggcg

SEQ ID NO: 646 - DNA, 252 bp, Carollia perspicillata
tgagcttccctccgccctacaaagaagtgacgtgcttcggaagaaaatatatgagacccactcctcaagaccttttacggttatggtgacttcccacagcacatagcgacatgcaaatatcgtgcgacgtgccccactgtcctttgcggacaccgccttgcccgtaaacgctctgtgtattcccgccttttgactctaaactggcgaatcctaggagagagtggttgtcgtagacgttcgggcgccatggcg

SEQ ID NO: 647 - DNA, 253 bp, Mormoops blainvillei
tgagcttccctccgccctatgggaggaaaacagcctttcacgcaaaatatatgaggcccatatgtgaggacctttcacgcttatggtgacttcccacaacacatagcgacatgcaaatatcgcaggacttgcttccactttcctttgggtatcgtctcgcccggaagcgcgcgctgtttgttcccgccttttgcttctaggcgagcgaatcctgggagagggctgttgacgtcaatattcgggctcaatggcg

SEQ ID NO: 648 - DNA, 250 bp, Desmodus rotundus
gagcttctctccgccccttaactcagagactgatcgtgaataaatatggggcccaagtctcaggaactcttttggttacggtgatttcccacaatacatagcgacatgcaaatatagtggggtgcgcttccacagtcctttgcggacaccgtccagcccgtaagcgctcgctgtgtagtcccgcctttagactccaggtgagcgaatcctgggagagggttgctgacgttgacattcggcctccatggcg

SEQ ID NO: 649 - DNA, 225 bp, Tadarida brasiliensis
tgagcttcctccgccctgggggagaaggcgctttctgcgggttatataaggctccagcacctagaggcctctaacagttagggtgatttcccataatgcatagcgacatgcaaatatgtctgggtgtgctgtccctgtttcttgcctgcgagttcccgcctttggactgcaggcgggcgaatcctgggagagagttgatgacgtcaccactcaggctccatggcg

SEQ ID NO: 650 - DNA, 239 bp, Molossus molossus
tgagcttcctccgccctgggggagaagctgctttccacggattatataaggctccagcacctacagccctttaacagttagggtgatttcccacagtgcatagcgacatgcaaatgtagttgagtgtgctttccctgttccttgcctgcatcttcttgcctgcgtgttcccgccttttgactgcacgcgggcgaatcctgggagagagttgatgacgtcaacgctcaggttctatggcg

SEQ ID NO: 651 - DNA, 256 bp, Miniopterus schreibersii
tgagcttccctccgccctgggggagaaacggcatggtggccaatatataaggatcccgtacctaaaggcctttcacgcttagggtgacttcccacaacacatagcgacatgcaaatatagttaggcgcgcttccccggtccttcgcgggcttcttttggcccggacgcgtgcgcgcgctgcgtgttcccgccttttggctcggggcgggcgaatccagggagagagtgatgatgtcaacattcgggctccatggcg

SEQ ID NO: 652 - DNA, 256 bp, Miniopterus natalensis
tgagcttccctccgccctgggggagaaacggcatggtggccaatatataaggatcccgtacctaaaggcctttcacgcttagggtgacttcccacaacacatagcgacatgcaaatatagttaggcgcgcttccccggtccttcgccggcttcttttggcccggacgcgtgcgcgcgctgcgtgttcccgccttttggctcggggcgggcgaatccagggagagcgtgatgatgtcaacattcgggctccatggcg

SEQ ID NO: 653 - DNA, 256 bp, Pipistrellus pipistrellus
tgagcttccctccgccctgaggaaaggagcctcacacggcggctatataaggccccctgccctgtaggcctttcacagttagggcgacttcccacaacacatagcgacatgcaaatgtggatgggcgtgcctccccggtccctgccggcaacttctctctcggacgcgcgctcgcgctgagtgttcccgccttttgactccagcggagcgaatccggggagcgggcggatgacgtcaacagtgcggctccatggcg

SEQ ID NO: 654 - DNA, 256 bp, Pipistrellus pipistrellus
tgagcttccctccgccctgaggaagggagcctcacacggcggctatataaggccccctgccctgtaggcctttcacagttagggcgacttcccacaacacatagcgacatgcaaatgtggatgggcgtgcctccccggtccctgccagcaacttctctccgggacgcacgctggcgctgagtgttcccgccttttgacgccagcggagcgaatccggggagcgggcggatgacgtgaacagtgcggctccatggcg

SEQ ID NO: 655 - DNA, 254 bp, Pipistrellus pipistrellus
tgagcttccctccgccctgaggaagggagcctcacacggcggctatataaggccccctgccctgtaggcctttcacagttagggcgacttcccacaacacatagcgacatgcaaatgtatgggcgtgcctccccggtccctgccagcaacttctctccgggacgcacgctggcgctgagtgttcccgccttttgacgccagcggagcgaatccggggagcgggcggatgacgtgaacagtgcggctccatggcg

SEQ ID NO: 656 - DNA, 256 bp, Pipistrellus pipistrellus
tgagcttccctccgccctgaggaagggagcctcacacggcggctatataaggccccctgccctgtaggcctttcacagttagggcgacttcccacaacacatagcgacatgcaaatgtagatgggcgtgcctccccggtccctgccggcaacttctctccgggacgcgcgctcgagctgagagttcccgcctgttgacgccagccgagcgaatccggggagcgggcggatgacgtcaacagtgcggctccatggcg

SEQ ID NO: 657 - DNA, 257 bp, Pipistrellus kuhlii
tgagcttccctccgccctgaggaacggagcttcacacggcgactatataaggccccctgccctgtaggcctttcacagttagggcgactttcccacaacacatagcgacatgcaaatgtggatgggcgtgcctccccggtccctgcaagcaacttctctcccggacgcgcgctcgcgctgagtgttcccgccttttgacgccagcggagcgaatccggggagcgggcggatgacgtgaacagtgcggctccatggcg

SEQ ID NO: 658 - DNA, 255 bp, Lasiurus borealis
tgagcttccctccgccctgaggaagacggcttcacacgagggctatataaggcccccttacctataggtccttttcggttagagtgacttcccacaacacctagcgacatgcaaatttagatgggcgtgcctcctctgtcgctgtggcaacacctctccgggacgcgcgctcgctctgagtgttcccgccttttgactccagccgaacgaatcctgggagagggcagatgacgtcaatagtcaggctccatggcg

SEQ ID NO: 659 - DNA, 254 bp, Aeorestes cinereus
tgagcttccctccgccctggggaagagggcctcacacgagagctatataaggcccccttacctataggccttttatggttagagtgacttcccacaacacctagcgacatgcaaatttagatgggcgtgcctcctctgtccctgtggcaacacctctccgggacgcgcgctcgctctgagcgttcccgccttttgactccagccgaacgaatcctgggagagggcagtgacgtcaatagtcaggctccatggcg

SEQ ID NO: 660 - DNA, 255 bp, Aeorestes cinereus
tgagcttccctccgccctggggaagagggcctcacacgagggctatataaggcccccttacctagaggccttttatggttagagtgacttcccacaacacctagcgacatgcaaatttagatgggcgtgcctcctctgtccctgtggcaacacctctccgggacgcgcgctcgctctgagcgttcccgccctttgacttccagccgaacgaatcctgggagagggcagtgacgtcaatagtcaggctccatggcg

SEQ ID NO: 661 - DNA, 257 bp, Eptesicus fuscus
tgagcttccctccgccctggggaagcgagcgtcacacggcggatatataaggcccccttacctgaaggccttttacggttagggtgacttcccacaacacttagcgacatgcaaatttagacgggcgtgcctccccgtccctgtgggcaacttctctcctggacacgcgcgctcgcgctgagtgttcccgccttttgactccagccgagcgaatcctgggagagggcagatgacgtcaacagtcaggctccatggcg

SEQ ID NO: 662 - DNA, 256 bp, Nycticeius humeralis
tgagcttccctccgccctggggaagcgaggcctccttgccggctatataaggcccccttatcaacaggccttttacggtgagggtgacttcccacaacacatagcgacatgcaaatttagatgggcgtgcctcccctgtccctgtgggcaactcctctcccggacgcgcgctggcgcggagtgttcccgccacttgactccagccgagcgaatcctgggagcggccagatgacgtcagtagccgggctccatggcg

SEQ ID NO: 663 - DNA, 225 bp, Murina aurata
tgagcttccctccgccctgaggaagggaggcccagcaggcgggtatataaggcctccttgagtagagtccttttaggaatagggtgacttcccacaacacatggcgacatgcaaatttgatgggcgtgcctccgccgtccctgcgggcagcgttcccgccttttgactgcagccgagcggatcctgggagagggcgggtgacgtcagcagtccggctccatggcg

SEQ ID NO: 664 - DNA, 256 bp, Myotis myotis
tgagcttccctccgccctggaaaaaggctctccacacggcgggtatataaggcccccttatgtataatcctttaccggttagggtgacttcccacaacgcatagcgacatgcaaatttgacgggcgtgcctcctccgtccctgcgggcaacttctctcctggacgcgcgctcgcgctgcgtgttcccgccttttgactccagccaagcgaatcctgggagagggcaggtgacgtccaacagtcaggctcgatggcg

SEQ ID NO: 665 - DNA, 256 bp, Myotis myotis; identical to SEQ ID NO: 664

SEQ ID NO: 666 - DNA, 256 bp, Myotis lucifugus
tgagcttccctccgcccttgggagaaggaggcgtagacggcggatatataaggcccccttatgtgtagtccttttacggttagggtgacttcccacaacgcatagcgacatgcaaatttgacgggcgtgcctcctctgtccctgcgggcaacttctctcctggacgcgcgctcgcgctgcgtgttcccgccttttgactccagccgagcgaatcctgggagagggcaggtgacgtcaacagtcaggctcgatggcg

SEQ ID NO: 667 - DNA, 256 bp, Myotis brandtii
tgagcttccctccgcccttggaggaaggggaaggacatggcggatatataaggcccccttatgtatagtccttttgcagttagggtgacttcccacaacgcatagcgacacgcaaatttgacgggcgtgcctcttctgtctctgcgggcaacttctctcctggacgcgcgctcgcgctgcgtgttcccgccttttgactccagccgagcgaatcctgggagagggcaggtgacgtcaacagtcaggctcgatggcg

SEQ ID NO: 668 - DNA, 256 bp, Myotis davidii
tgagcttccctccgccctggagaggggctgtgcacacggcggatatataaggcccccttatgaataaccctttataagttatggtgatttcccacaacgcatagcgacatgcaaattcgatgggcgtgcctcctctgtccctgcaggcaacttctctcctggacgcgcgctcctcgctgcgtgttcccgccttttgactccagccgagcgaatcctgggagagggcaggtgacgtcaacagtcaggctcgatggcg

SEQ ID NO: 669 - DNA, 256 bp, Antrozous pallidus
tgagcttccctccgccctggggaaaggggccctacacggcggctatataaggcccccttaccgataggtctttatcggttagtgtgacttcccacaacacatcgcgacatgcaaatgtagatgggcgtgcctcccctgtcccctggcacatgtagatgggcgcggcgctcgcgctgagtgttcccgcctttgggctccagcagagcgaatcttgggagagggcaggtggtgacgtccatagccaggctccatggcg

SEQ ID NO: 670 - DNA, 252 bp, Noctilio leporinus
tgagcttccctccgccctacaaggaaatttgggctcctgcacgaaaatatatcaggctcaaatctgaatgcctttcttggttatggtgacttcccacaatacatagcgatatgcaaatatagtggtgtgtgccttccctcttcctctagtctcgtcgccaggaagtgagagagccacttgctcccgtctttgactttttgcgggcgaattctgggagagggttgatgacgtcaatattcgggctccatggcg

SEQ ID NO: 671 - DNA, 220 bp, Craseonycteris thonglongyai
tgagcttcccgccgccctacgagaaaaggactgcccatctcgcttttataagattgctatatcgaactatattttaaggttagggtgacttcccacaatacaaagcgatatgcaaatatggagggcgtgtctcctttggccaggacacaagcctgctgctgcctgttcccgccttgtttgctagtcctgggagaggtttgatgacgttgacaccatggcg

SEQ ID NO: 672 - skipped

SEQ ID NO: 673 - DNA, 258 bp, Artificial Sequence
  Description of Artificial Sequence: Synthetic polynucleotide
  modified_base (19)..(19): a, c, t, or g
  modified_base (37)..(37): a, c, t, or g
  modified_base (54)..(54): a, c, t, or g
  modified_base (120)..(120): a, c, t, or g
  modified_base (123)..(123): a, c, t, or g
  modified_base (145)..(145): a, c, t, or g
  modified_base (169)..(174): a, c, t, or g
  modified_base (201)..(202): a, c, t, or g
tgagcttccctccgccctnbgrgrrrrrvvbbyywsnygsmrrmtatataaggnycccwywyctvwagrcmtttyamgrttasggtgayttcccacaayacatagcgacatgcaaatrwnghngggygtgcctycmckgtccytngysgrcrdcktctykcyvgkamgnnnnnncgcgctgmgtrttcccgccttktgacnnyarvykrgcgartcckgggagrggrywgwtgacgtcaacaktcvggctccatggcg

SEQ ID NO: 674 - DNA, 270 bp, Artificial Sequence
  Description of Artificial Sequence: Synthetic polynucleotide
  modified_base (19)..(19): a, c, t, or g
  modified_base (31)..(33): a, c, t, or g
  modified_base (40)..(40): a, c, t, or g
  modified_base (57)..(58): a, c, t, or g
  modified_base (123)..(124): a, c, t, or g
  modified_base (126)..(126): a, c, t, or g
  modified_base (148)..(148): a, c, t, or g
  modified_base (151)..(151): a, c, t, or g
  modified_base (156)..(156): a, c, t, or g
  modified_base (164)..(164): a, c, t, or g
  modified_base (166)..(169): a, c, t, or g
  modified_base (172)..(177): a, c, t, or g
  modified_base (180)..(181): a, c, t, or g
  modified_base (204)..(205): a, c, t, or g
  modified_base (219)..(219): a, c, t, or g
  modified_base (243)..(251): a, c, t, or g
tgagcttccctccgccctnbrvgdrrrdvvnnnbbbbdbnbgsvrrhtatatragrnnccydywyskvwagrcmtttywhrrktasggtgayttcccacaayrcatagcgacatgyaaatdhnnhnrggyrtgcytychckgkccyyngynrrmrncdyctyknynnnnmgnnnnnnsgnnctghghrttcccgccttbtgrcnnyrrvybrgcgartncdgggarrrgrywgdtkaygtcrnnnnnnnnnacwktyvsgctcsatggcg

SEQ ID NO: 675 - DNA, 270 bp, Artificial Sequence
  Description of Artificial Sequence: Synthetic polynucleotide
  modified_base (9)..(9): a, c, t, or g
  modified_base (19)..(19): a, c, t, or g
  modified_base (29)..(34): a, c, t, or g
  modified_base (40)..(40): a, c, t, or g
  modified_base (57)..(58): a, c, t, or g
  modified_base (123)..(126): a, c, t, or g
  modified_base (148)..(148): a, c, t, or g
  modified_base (151)..(151): a, c, t, or g
  modified_base (155)..(156): a, c, t, or g
  modified_base (160)..(162): a, c, t, or g
  modified_base (164)..(169): a, c, t, or g
  modified_base (171)..(177): a, c, t, or g
  modified_base (179)..(181): a, c, t, or g
  modified_base (185)..(185): a, c, t, or g
  modified_base (200)..(200): a, c, t, or g
  modified_base (203)..(205): a, c, t, or g
  modified_base (208)..(208): a, c, t, or g
  modified_base (219)..(219): a, c, t, or g
  modified_base (243)..(251): a, c, t, or g
tgagcttcnctccgccctnbrvrdrrrdnnnnnnbbbdbnbvvvrrhtatatragrnnccydbhyskvdrgdymttthwhrrkkabggtgayttcccacaayrcahagcgacatgyaaatdhnnnnrgryrtgyytychcbgkccyyngynrdmnnydynnnknnnnnnmnnnnnnnsnnnsygnbhdwtcccgccttbngrnnnyrnvbbrgcgartncdgggarvrrrydgdtkaygtvrnnnnnnnnnrywbwbvsgcwysatggcg

SEQ ID NO: 676 - DNA, 270 bp, Artificial Sequence
  Description of Artificial Sequence: Synthetic polynucleotide
  modified_base (9)..(9): a, c, t, or g
  modified_base (19)..(19): a, c, t, or g
  modified_base (28)..(38): a, c, t, or g
  modified_base (40)..(41): a, c, t, or g
  modified_base (47)..(47): a, c, t, or g
  modified_base (57)..(58): a, c, t, or g
  modified_base (63)..(64): a, c, t, or g
  modified_base (79)..(79): a, c, t, or g
  modified_base (122)..(126): a, c, t, or g
  modified_base (139)..(139): a, c, t, or g
  modified_base (141)..(141): a, c, t, or g
  modified_base (143)..(143): a, c, t, or g
  modified_base (148)..(153): a, c, t, or g
  modified_base (155)..(181): a, c, t, or g
  modified_base (183)..(185): a, c, t, or g
  modified_base (189)..(189): a, c, t, or g
  modified_base (199)..(208): a, c, t, or g
  modified_base (211)..(211): a, c, t, or g
  modified_base (219)..(219): a, c, t, or g
  modified_base (221)..(221): a, c, t, or g
  modified_base (231)..(231): a, c, t, or g
  modified_base (234)..(234): a, c, t, or g
  modified_base (243)..(251): a, c, t, or g
  modified_base (258)..(258): a, c, t, or g
  modified_base (264)..(264): a, c, t, or g
tgagcttcnctccgccctnbrvrdrrdnnnnnnnnnnnbnnvvvvrntatatragrnncchdnnhbkvddrdhmttthnhrvdkabrgyrayttcccayaayrcmhrgcrayatgyaaatdnnnnnrrdbdygyykbynbnsnyyybnnnnnnhnnnnnnnnnnnnnnnnnnnnnnnnnnnsnnnbhdntcccgcctynnnnnnnnnnvbndrcrartncnrggarvrrrndgntkaygyvrnnnnnnnnnrywbhbnbgcdynatggcg

SEQ ID NO: 677 - DNA, 281 bp, Artificial Sequence
  Description of Artificial Sequence: Synthetic polynucleotide
  modified_base (9)..(9): a, c, t, or g
  modified_base (19)..(20): a, c, t, or g
  modified_base (24)..(24): a, c, t, or g
  modified_base (27)..(41): a, c, t, or g
  modified_base (43)..(44): a, c, t, or g
  modified_base (47)..(47): a, c, t, or g
  modified_base (57)..(59): a, c, t, or g
  modified_base (63)..(66): a, c, t, or g
  modified_base (69)..(71): a, c, t, or g
  modified_base (73)..(73): a, c, t, or g
  modified_base (80)..(81): a, c, t, or g
  modified_base (84)..(84): a, c, t, or g
  modified_base (94)..(94): a, c, t, or g
  modified_base (124)..(129): a, c, t, or g
  modified_base (138)..(138): a, c, t, or g
  modified_base (141)..(145): a, c, t, or g
  modified_base (147)..(148): a, c, t, or g
  modified_base (150)..(194): a, c, t, or g
  modified_base (203)..(218): a, c, t, or g
  modified_base (221)..(221): a, c, t, or g
  modified_base (226)..(226): a, c, t, or g
  modified_base (228)..(228): a, c, t, or g
  modified_base (237)..(242): a, c, t, or g
  modified_base (244)..(244): a, c, t, or g
  modified_base (251)..(252): a, c, t, or g
  modified_base (254)..(262): a, c, t, or g
  modified_base (266)..(273): a, c, t, or g
  modified_base (275)..(275): a, c, t, or g
tgagcttcnckccgcccynnrvvnvvnnnnnnnnnnnnnnnvnnvvntwwakvwrvnnnbyhnnnnbdnnndnhmyythnnvvnkabdgyraynttcccayrrbrchhvgcrayaygyaaawdnnnnnnddbdysybnbynnnnnbnnbnnnnnnnnnnnnnnnnnnnnnnnnnnnnnnnnnnnnnnnnnnnnntyyygbyhnnnnnnnnnnnnnnnndrndrvknynrggrrvrvnnnnnngntbwyghnnvnnnnnnnnnvydnnnnnnnnynatggcg

SEQ ID NO: 678 - DNA, 201 bp, Artificial Sequence
  Description of Artificial Sequence: Synthetic polynucleotide
  modified_base (1)..(1): a, c, t, or g
  modified_base (4)..(4): a, c, t, or g
  modified_base (14)..(14): a, c, t, or g
  modified_base (44)..(49): a, c, t, or g
  modified_base (58)..(58): a, c, t, or g
  modified_base (61)..(65): a, c, t, or g
  modified_base (67)..(68): a, c, t, or g
  modified_base (70)..(114): a, c, t, or g
  modified_base (123)..(138): a, c, t, or g
  modified_base (141)..(141): a, c, t, or g
  modified_base (146)..(146): a, c, t, or g
  modified_base (148)..(148): a, c, t, or g
  modified_base (157)..(162): a, c, t, or g
  modified_base (164)..(164): a, c, t, or g
  modified_base (171)..(172): a, c, t, or g
  modified_base (174)..(182): a, c, t, or g
  modified_base (186)..(193): a, c, t, or g
  modified_base (195)..(195): a, c, t, or g
nvvnkabdgyraynttcccayrrbrchhvgcrayaygyaaawdnnnnnnddbdysybnbynnnnnbnnbnnnnnnnnnnnnnnnnnnnnnnnnnnnnnnnnnnnnnnnnnnnnntyyygbyhnnnnnnnnnnnnnnnndrndrvknynrggrrvrvnnnnnngntbwyghnnvnnnnnnnnnvydnnnnnnnnynatggcg

SEQ ID NO: 679 - DNA, 231 bp, Galeopterus variegatus
tgagcttccctccgccctaccccccaagtgggccacaggcggtatttataaggcttacagccctaaagacatttaccattatggtgacttcccataatacatagcgacatgcaaaattgaggggcgtgccagacgggcgtcgtctctccgaagcgcacgcgcgctgcgtgttcccgccgcgtgacacggcccgcgattcctgagagcgagttggtgacgtgaacccatggc

SEQ ID NO: 680 - DNA, 231 bp, Galeopterus variegatus
tgagcttccctccgccctaccccccaagtggcccacaggcggtatttataaggcttacagccctaaagacatttaccattatggtgacttcccataatacatagcgacatgcaaaattgaggggcgtgccagacgggcgtcgtctctccgaagcgcacgcgcgctgcgtgttcccgccgcgtgacacggcccgcgattcctgagagcgagttggtgacgtgaacccatggc

SEQ ID NO: 681 - DNA, 231 bp, Artificial Sequence
  Description of Artificial Sequence: Synthetic polynucleotide
tgagcttccctccgccctaccccccaagtggsccacaggcggtatttataaggcttacagccctaaagacatttaccattatggtgacttcccataatacatagcgacatgcaaaattgaggggcgtgccagacgggcgtcgtctctccgaagcgcacgcgcgctgcgtgttcccgccgcgtgacacggcccgcgattcctgagagcgagttggtgacgtgaacccatggc

SEQ ID NO: 682 - DNA, 265 bp, Procavia capensis
tgagcttccctccgccctatagggtaaatcggcgctgctcagcatttaaaagaatcccaaatgtgtcgccattttacgcttagggtgatatcccacaagacacagcgacatgcaaatatcgtgagtctctgggaggtgagtttccctgtccacgagggcgtcctctcgctggggcgcacgcgcggtgtgtgtgcccccgttgtgtgttcccgctctttgattccaaagaactggttgataacgttagacttccggctgcatggcg

SEQ ID NO: 683 - DNA, 265 bp, Heterohyrax brucei
tgagcttccctccgccctatagggtaaatcggcgctgctcagcatttaaaagaatcccaaatgtgtagccattttacgcttagggtgatatcccacaaggcgcagcgacatgcaaatatcatgcgtctctgagaggtgagtttccctgtccacgagggcgtcctctcgctggggcgcacgcgcggtgtgtgtgcccccgttgtgtgttcccgctctttgattccaaagaactggttgataacgttagacttccggctccatggcg

SEQ ID NO: 684 - DNA, 237 bp, Erinaceus europaeus
tgagcttccctccgccctaccggcctaaaccggctctttcgacagacttataaggacctcttatcttaggacatttttttgttagggtaacttcccacgatgcatagcgatatgtaaatatggcgccgcgagtctctcctaggcgtctccccaggacgcaggcgcactgcttgttcccgcgttaacattgctgattctgggagactgctgatgacgtcagcgtccagtctacatggc

SEQ ID NO: 685 - DNA, 237 bp, Erinaceus europaeus
tgagcttccctccgccctaccggcctaaaccggctctttcaacagacttataaggacctcttatcttaggacatttttttcttagggtaacttcccatgatgcacagcgatatgtaaatatggcgccgcgagtctctcctaggcgtctccccaggacgcaggcgcactgcttgttcccgcgttaacattgctgattctgggagactgctgatgacgtcagcgtccagtctacatggc

SEQ ID NO: 686 - DNA, 258 bp, Solenodon paradoxus
tgagcttccctccgccctatcagcgtaaagaagtgcgtacaaagaatttataaggctcacatagctctagctgcttctcagttagggtgacttcccacaagccatagcgcatgtaaatataagggcgtttgttcccccgcccccgtccaggctgcagcatctctccaggacgcaggcgcactgagccttcccgcccggtcactccagacccgccattcccgggccaggttaatgacgtcacacttaagctccatggcg

SEQ ID NO: 687 - DNA, 258 bp, Solenodon paradoxus
tgagcttccctccgccctatcagcgtaaaggagtgcgtacaaagaatttataaggctcgcatagctctagctgcttcacagttagggtgacttcccacaagccatagcgcatgtaaatacaagggcgtttgttcccccgcccccgtccaggctgcagcatctctccaggacgcaggcgcactgagccttcccgcccggtcactccagacccgccattcccgggccaggttaatgacgtcacacttaagctccatggcg

SEQ ID NO: 688 - DNA, 251 bp, Scalopus aquaticus
tgagcttccctccgccctatcagcgtaaaagaatgcttagctgggatttataaggctcccagacctaaagccatagctcggttagggtgacttcccacaagacatagcgacatgcaaatatagaggggcgggcttcccctgtgccttgtaggcgtcttctcacgaaatcgcaagcgcgttgcatgttcccgccctgtcactattggccgatcttttccggcggagtctaagacgtcatcggttccatggcg

SEQ ID NO: 689 - DNA, 271 bp, Condylura cristata
tgagcttccctccgccctatcagcgcagagacaagcttagctagaatttataaggcgcccatacttgcagacatatatcggttagggtgacttcccacaagccatagcgacatgcaaatagagagggcgggcttcccctgagctttgtaggcgtcttcttacgaagtcgcgagcgcgtcgcgcgcctgttcccgcccggtcactattggcctgtcactattgtcattccgcccttcccgggcggagtctggtgactttcggttccatggcg

SEQ ID NO: 690 - DNA, 246 bp, Uropsilus gracilis
tgagcttcctccgccctccggcgtaaaggctggcttacctaccctttataaggctcccagacgtaaagccatatcagagttagggtgacttcccacaagacgtagcgacatgcaaatatagaggggcgggtttgtccagtgccctataggcgtcttctggagtcgcccgcgctttgagctcccgtactgtccctattggccgagcattccagtcgtagtctgatgacctcattcgcttccatggcg

SEQ ID NO: 691 - DNA, 229 bp, Sorex araneus
tgagcttccctccgccctaccggcgtaagacgcgccgcatcgcgtacttataaggatcccctggtcaacgatcttttacagttagggtgacttcccacagtacacggcggtattcaaatatgaagggcgtgtctagtccgggtcttaggtttgggggcggggtctggctaggcgcatgtgcagtgctggttcccgccacttccgacgtctacgtttagactccatggcg

SEQ ID NO: 692 - DNA, 285 bp, Artificial Sequence
  Description of Artificial Sequence: Synthetic polynucleotide
tgagcttccctccgccctaycrgcgtaaavsrrbkcktasmwmrrayttataaggmycycwtasythwrgmyrtwtywydgttagggtgacttcccacaakmcatagcgayatgyaaatatrrvggsgcgkgtytcycckvggtcyyhgyyywgkmggcgkcwtctyhcsargwcgcargcgcrytgmkcgccygttcccgccckgtcamymywgvyctgtcactattgtcattccsrbcwttcysggvsvmkkytratgacgtcarcryytmgkytccatggcg

SEQ ID NO: 693 - DNA, 285 bp, Artificial Sequence
  Description of Artificial Sequence: Synthetic polynucleotide
  modified_base (33)..(33): a, c, t, or g
  modified_base (45)..(45): a, c, t, or g
  modified_base (59)..(59): a, c, t, or g
  modified_base (140)..(140): a, c, t, or g
  modified_base (179)..(179): a, c, t, or g
  modified_base (194)..(194): a, c, t, or g
  modified_base (275)..(275): a, c, t, or g
tgagcttccctccgccctaycrgcstaaavvvnbkcktwsmwmrnayttataaggmycncwkabythwrgmyrywtywydgttagggtracttcccacrakvcayagcgryatgyaaatabrrvgssgykdgyyyvyccnvggtcyyhgbyywrkvkgcrksdtctyhcsargwcgcvngcgcrytgmkcgccnsttcccgcmmbgtyamymywgvystgtcactattgtcattccsvbcwttcysggvsvmkkytratgacbtcarcryyymrnytmcatggcg

SEQ ID NO: 694 - DNA, 285 bp, Artificial Sequence
  Description of Artificial Sequence: Synthetic polynucleotide
  modified_base (33)..(34): a, c, t, or g
  modified_base (45)..(45): a, c, t, or g
  modified_base (59)..(59): a, c, t, or g
  modified_base (67)..(67): a, c, t, or g
  modified_base (140)..(140): a, c, t, or g
  modified_base (168)..(168): a, c, t, or g
  modified_base (179)..(179): a, c, t, or g
  modified_base (194)..(194): a, c, t, or g
  modified_base (251)..(251): a, c, t, or g
  modified_base (275)..(275): a, c, t, or g
tgagcttccctccgccctaycrgcsyarrvvvnnbckywbvdvvnmyttataaggmbcnchkrbbynhvgmyvywkhwbdsttagggtracttcccayrrkvcryrgcgryatkyaaatabrrvgssgykdgyyyvbycnvggtcyyhgbyywrkvkgcrksdtctbnybrrrwcgcvngygcdbygmdcgccnsytcccgymmbktymmymywgvystgtcactattgtcattccsvbcwtyyyvgkvsnmkkytrrtgacbtcwrcryyymrnytmcatggcg

SEQ ID NO: 695 - DNA, 285 bp, Artificial Sequence; identical to SEQ ID NO: 694
  Description of Artificial Sequence: Synthetic polynucleotide
  modified_base (33)..(34): a, c, t, or g
  modified_base (45)..(45): a, c, t, or g
  modified_base (59)..(59): a, c, t, or g
  modified_base (67)..(67): a, c, t, or g
  modified_base (140)..(140): a, c, t, or g
  modified_base (168)..(168): a, c, t, or g
  modified_base (179)..(179): a, c, t, or g
  modified_base (194)..(194): a, c, t, or g
  modified_base (251)..(251): a, c, t, or g
  modified_base (275)..(275): a, c, t, or g

SEQ ID NO: 696 - DNA, 285 bp, Artificial Sequence; identical to SEQ ID NO: 694
  Description of Artificial Sequence: Synthetic polynucleotide
  modified_base (33)..(34): a, c, t, or g
  modified_base (45)..(45): a, c, t, or g
  modified_base (59)..(59): a, c, t, or g
  modified_base (67)..(67): a, c, t, or g
  modified_base (140)..(140): a, c, t, or g
  modified_base (168)..(168): a, c, t, or g
  modified_base (179)..(179): a, c, t, or g
  modified_base (194)..(194): a, c, t, or g
  modified_base (251)..(251): a, c, t, or g
  modified_base (275)..(275): a, c, t, or g

SEQ ID NO: 697 - DNA, 285 bp, Artificial Sequence; identical to SEQ ID NO: 694
  Description of Artificial Sequence: Synthetic polynucleotide
  modified_base (33)..(34): a, c, t, or g
  modified_base (45)..(45): a, c, t, or g
  modified_base (59)..(59): a, c, t, or g
  modified_base (67)..(67): a, c, t, or g
  modified_base (140)..(140): a, c, t, or g
  modified_base (168)..(168): a, c, t, or g
  modified_base (179)..(179): a, c, t, or g
  modified_base (194)..(194): a, c, t, or g
  modified_base (251)..(251): a, c, t, or g
  modified_base (275)..(275): a, c, t, or g

SEQ ID NO: 698 - DNA, 236 bp, Ochotona princeps
tgagcttcctccgccctatgggggaagctgggctcgatcagcctttataaagctccaaaaactcaagacatttttctgttacggtggcttcccacagtacacagcgacatgcaaatagcttgccaatgaattcgcggaccgcttcccgccccggcgcaggcgcgcggacgctgtctcccctggacgcgcgctcgcggttcccgggagctggctgatgacgttcggtctccatggcg

SEQ ID NO: 699 - DNA, 236 bp, Ochotona princeps
tgagcttcctccgccctatgggggaagctgggctcgatcagcctttataaagctccaaaaactcaagacatttttccgttacggtggcttcccacagtacacagcgacatgcaaatagcttgccaatgagttcgcggaccgcttcccgctccggcgcaggcgcgcgggcgctgtctcccctggacgcgcgctcgcggttcccgggagctggctgatgacgttcggtctccatggcg

SEQ ID NO: 700 - DNA, 237 bp, Lepus americanus
tgagcttcctccgccctacggggagtggtggatccaagcagactttataaagctccgaaggtccaaggcatctttcccttacggtggcttcccacaagacatagcgatatgcaaatttatcgatacgcgcttcagacgcccgtctcgccgcagcgcaagcgcgctgtgtgctgacgcgggggacgggccagtgcgcgattcccgggagcgggttgatgacgttcgatctccatggcg

SEQ ID NO: 701 - DNA, 237 bp, Lepus timidus
tgagcttcctccgccctatggggagtggtggatccaagcagactttataaagctccgaaggtccaaggcatctttcccttacggtggcttcccacaagacatagcgatatgcaaatctatcgatacgtgcttcagacgcgcttctcgccgcagcgcaagcgcgctgtgtgctgacgcgggggacgggccagtgcgcgattcccgggagcgggttgatgacgttcgatctccatggcg

SEQ ID NO: 702 - DNA, 236 bp, Oryctolagus cuniculus
tgagcttcctccgccctatggggagaggtggatccgaacagactttataaagctccgaaaacccaaggcatctttcccttacggtagcttcccacaagacatagcgacatgcaaatttcttgaagtatgcttcagacgcgcttctcgccacagcgcaagcgcgctgtgtgctgacgcgggaacgggccagggcgcggttcccgggagcgggttgatgacgttagatctccatggcg

SEQ ID NO: 703 - DNA, 236 bp, Oryctolagus cuniculus
tgagcttcctccgccctatggggagaggtggatccgaacagactttataaagctccgaaagcccaaggcatctttcccttacggtagcttcccacaagacatagcgacatgcaaatttcttgaagtatgcttcagacgcgcttctcgccacagcgcaagcgcgctgtgtgctgacgcgggaacgggccagggcgcggttcccgggagcgggttgatgacgttagatctccatggcg

SEQ ID NO: 704 - DNA, 233 bp, Oryctolagus cuniculus
tgagcttcctccgccctatggggagaggtgggtccgaacagactttataaagctccgaaagcccgaggcatctttcccttacggtagcttcccacaagacatagcgacatgcaaatttcttgaatgcttcagacgcgcttctcgccacagcgcaagcgcgctgtgtgctgacgcgggaacgggccagtgcgcggttcccgggagcgggttgatgacgttagatctccatggcg

SEQ ID NO: 705 - DNA, 237 bp, Sylvilagus bachmani
tgagcttcctccgccctatggggagagctgcagccagacagactttataaagctccgaaagcccaaggcatctttcccttacagtgatttcccacaaggcctagcgacatgcaaatttattgaagtaaccgtcagacgcgcttctcgccgcagcgcaagcgcgctgtgtgctgacgcgggagacgggccggcgcgcggttcccgggagcgggttgatgacgttcgatctccatggcg

SEQ ID NO: 706 - DNA, 239 bp, Artificial Sequence
  Description of Artificial Sequence: Synthetic polynucleotide
tgagcttcctccgccctatggggagagstggryccradcagactttataaagctccgaaarcccaaggcatctttcccttacggtrgcttcccacaagacatagcgacatgcaaatwtmttgahrhdkrcttcacgacgcgcttctcgccrcagcgcaagcgcgctgtgtgctgacgccsgggracgggccagygcgcggttcccgggagcgggttgatgacgttmgatctccatggcg

SEQ ID NO: 707 - DNA, 239 bp, Artificial Sequence
  Description of Artificial Sequence: Synthetic polynucleotide
  modified_base (128)..(128): a, c, t, or g
tgagcttcctccgccctatggggrrwgstggryycradcagmctttataaagctccraarryycaagrcatytttccsttacggtrgcttcccacarkacayagcgayatgcaaatwkmtygmhrhdnrvttcrcgrmscgcttcycgccvcrgcgcargcgcgctgkgygctgwckccsskgracgsgccrgbkcgcgrttcccgggagckggytgatgacgttmgrtctccatggcg

SEQ ID NO: 708 - DNA, 239 bp, Artificial Sequence
  Description of Artificial Sequence: Synthetic polynucleotide
  modified_base (128)..(128): a, c, t, or g
tgagcttcctccgccctayggggrrwgstgsrbycrrdcagmctttataaagctccraarryycragrcatytttcysttacrgtrryttcccacarkrcmyagcgayatgcaaathkmtygmhrhdnvvktcrcgrmscscktcycgcyvcrgcgcargcgcgctgkrygctgwckccsskrracgsgccrgbkcgcgrttcccgggagckggytgatgacgttmgrtctccatggcg

SEQ ID NO: 709 - DNA, 239 bp, Artificial Sequence; identical to SEQ ID NO: 708
  Description of Artificial Sequence: Synthetic polynucleotide
  modified_base (128)..(128): a, c, t, or g

SEQ ID NO: 710 - DNA, 239 bp, Artificial Sequence; identical to SEQ ID NO: 708
  Description of Artificial Sequence: Synthetic polynucleotide
  modified_base (128)..(128): a, c, t, or g

SEQ ID NO: 711 - DNA, 239 bp, Artificial Sequence; identical to SEQ ID NO: 708
  Description of Artificial Sequence: Synthetic polynucleotide
  modified_base (128)..(128): a, c, t, or g

SEQ ID NO: 712 - DNA, 263 bp, Monodelphis domestica
tgagcttccctccgccctatggtgcggggcctcaaagagagcgatatataacgctcacaaaacccgtgctatttcttacagagggtgagtatccccatgatccccggcggtatgcaaatagtagtcgcgtcagagcagagcgcagtcagccgctctctcctagcgcgggaaatctattttcttcttcagtctcggtaacgagcgcatgcgcatactgtaggtgacctacggttttgtcaggaatcggttgggagcaccatggc

SEQ ID NO: 713 - DNA, 263 bp, Monodelphis domestica; identical to SEQ ID NO: 712

SEQ ID NO: 714 - DNA, 272 bp, Sarcophilus harrisii
tgagcttccctccgccctacgtaagcctcccgcccgggggccgctatataaggctcaccaaaccagtgctacttcttacagagggtgaatatcccgtgatacttagcggcatgcaaacaagagcttacgtcagagtagagcacaaccttccagtctttcctagcgcgggaaatcccgttttcttcagaggtcgtaggtgacaggcgcatgcgccgaagccagagaatgatccgggaaggtaggcccgcctggattcggtttagagcgccatg

SEQ ID NO: 715 - DNA, 272 bp, Sarcophilus harrisii; identical to SEQ ID NO: 714

SEQ ID NO: 716 - DNA, 272 bp, Sarcophilus harrisii; identical to SEQ ID NO: 714

SEQ ID NO: 717 - DNA, 269 bp, Trichosurus vulpecula
tgagcttccccccgccctacgtggaatcccgcctaagcggctctatataaggctcgccaattccgtactctttctagcagagggcgaaaaccccatgatccttggcggcatgcaaataacagcttgcatcagagtagggcgcggcctaccagtccttcctagcgcgggaaatcccgttttcttctgcggtcgccggggacgcgcgcgtgcgccgtagccagagagcggtccgggaaggtgggccggcggggattcggttgagagcgcta

SEQ ID NO: 718 - DNA, 269 bp, Trichosurus vulpecula
tgagcttccccccgccctacgtggaatcccgcctaagcggctctatataaggctcgccaattccgtactctttctagcagagggcgaaaaccccatgatccttggcggcatgcaaataacagcttgcatcagagtagggcgcggcctaccagtccttcctagcgcgggaaatcccgttctcttctgcggtcgccggggacgcgcgcgtgcgccgtagccagagagcggtccgggaaggtgggccggcggggattcggttgagagcgcta

SEQ ID NO: 719 - DNA, 275 bp, Artificial Sequence
  Description of Artificial Sequence: Synthetic polynucleotide
  modified_base (23)..(23): a, c, t, or g
  modified_base (92)..(92): a, c, t, or g
  modified_base (125)..(125): a, c, t, or g
  modified_base (175)..(175): a, c, t, or g
  modified_base (194)..(194): a, c, t, or g
  modified_base (215)..(217): a, c, t, or g
  modified_base (234)..(239): a, c, t, or g
tgagcttcccyccgccctaygknrsvvkscckcmhrrrsrsckmtatataasgctcrcmaawycmgtrctmyttctwrcagagggygarwanycccrtgatmcyyrgcggyatgcaaayarbagntyrcrtcagagyagrgcrcrrycwdccrstcyytcctagcgcgggaaatncyrttttcttcwkmrgtcnymggkracrvgcgcrtgcgcnnnakmcwgwrrrygrycynnnnnnryrgkyybgysdggawtcggttkrgagcrcyatggc

SEQ ID NO: 720 - DNA, 275 bp, Artificial Sequence; identical to SEQ ID NO: 719
  Description of Artificial Sequence: Synthetic polynucleotide
  modified_base (23)..(23): a, c, t, or g
  modified_base (92)..(92): a, c, t, or g
  modified_base (125)..(125): a, c, t, or g
  modified_base (175)..(175): a, c, t, or g
  modified_base (194)..(194): a, c, t, or g
  modified_base (215)..(217): a, c, t, or g
  modified_base (234)..(239): a, c, t, or g

SEQ ID NO: 721 - DNA, 275 bp, Artificial Sequence
  Description of Artificial Sequence: Synthetic polynucleotide
  modified_base (23)..(23): a, c, t, or g
  modified_base (92)..(92): a, c, t, or g
  modified_base (125)..(125): a, c, t, or g
  modified_base (175)..(175): a, c, t, or g
  modified_base (194)..(194): a, c, t, or g
  modified_base (215)..(217): a, c, t, or g
  modified_base (234)..(239): a, c, t, or g
tgagcttcccyccgccctaygknrsvvkscckcmhrrrsrsckmtatataasgctcrcmaawycmgtrctmyttctwrcagagggygarwanycccrtgatmcyyrgcggyatgcaaayarbagntyrcrtcagagyagrgcrcrrycwdccrstcyytcctagcgcgggaaatncyrttytcttcwkmrgtcnymggkracrvgcgcrtgcgcnnnakmcwgwrrrygrycynnnnnnryrgkyybgysdggawtcggttkrgagcrcyatggc

SEQ ID NO: 722 - DNA, 275 bp, Artificial Sequence; identical to SEQ ID NO: 721
  Description of Artificial Sequence: Synthetic polynucleotide
  modified_base (23)..(23): a, c, t, or g
  modified_base (92)..(92): a, c, t, or g
  modified_base (125)..(125): a, c, t, or g
  modified_base (175)..(175): a, c, t, or g
  modified_base (194)..(194): a, c, t, or g
  modified_base (215)..(217): a, c, t, or g
  modified_base (234)..(239): a, c, t, or g

SEQ ID NO: 723 - DNA, 275 bp, Artificial Sequence; identical to SEQ ID NO: 721
  Description of Artificial Sequence: Synthetic polynucleotide
  modified_base (23)..(23): a, c, t, or g
  modified_base (92)..(92): a, c, t, or g
  modified_base (125)..(125): a, c, t, or g
  modified_base (175)..(175): a, c, t, or g
  modified_base (194)..(194): a, c, t, or g
  modified_base (215)..(217): a, c, t, or g
  modified_base (234)..(239): a, c, t, or g

SEQ ID NO: 724 - DNA, 275 bp, Artificial Sequence; identical to SEQ ID NO: 721
  Description of Artificial Sequence: Synthetic polynucleotide
  modified_base (23)..(23): a, c, t, or g
  modified_base (92)..(92): a, c, t, or g
  modified_base (125)..(125): a, c, t, or g
  modified_base (175)..(175): a, c, t, or g
  modified_base (194)..(194): a, c, t, or g
  modified_base (215)..(217): a, c, t, or g
  modified_base (234)..(239): a, c, t, or g

SEQ ID NO: 725 - DNA, 261 bp, Manis pentadactyla
tgagcttccctccgccctatggcggaaagcggcccgcagccgcatttataaggctctcccacctaaagccatataatggttatggtgacttcccagaatacatggcaacatgcaaatatcgtgcggtatacctcccctgtcgcgcgtaggcgtctcctcccctggacgcatgggcgccgcatgttcccgccctatgactcggggctggcgactacgggagagagctgatgacgtgaccgcgaccgctcgggttccatggcg

SEQ ID NO: 726 - DNA, 259 bp, Manis javanica
tgagcttccctccgccctatggcagaaagcagcccgccgccgcatttataaggctctcccacctaaagccatatactggttatggtgacttcccagaagacatggcaacatgcaaatatatgcggtctacttcccctgttgcgcgtaggcgtctcctcccctggacgaacgggcgcgcatgttcccgccctatgactctgggccagcgactacgggagagagctgatgacgtgaccgcgaccgctcgggctccatggcg

SEQ ID NO: 727 - DNA, 259 bp, Manis javanica
tgagcttccctccgccctatggcagaaagcagcccgccgccgcatttataaggctctcccacctaaagccatatactggttatggtgacttcccagaagacatggcaacatgcaaatatatgcggtctacttcccctgttgcgcgtaggcgtctcctcccctggacgaacgggcgcgcatgttcccgccctatgactctgggcctgcgactacgggagagagctgatgacgtgaccgcgaccgctcgggctccatggcg

SEQ ID NO: 728 - DNA, 258 bp, Phataginus tricuspis
tgagcttccctccgccctacagaaaccagcgcccccgcccgcacttataagcctctccctactaaagacatttgacgattatggtgacttcccacaatacatagctacatgcaaatacagcgcgttatgccgcccctgtggcgcgtaggcgtctcccccccggacgcgcaggcgctgcgttccctccctgtgtgactctaggccggcgactaccggagcggctgatgacgtgagcgcgaccgctcgcggtccatggcg

SEQ ID NO: 729 - DNA, 261 bp, Artificial Sequence
  Description of Artificial Sequence: Synthetic polynucleotide
  modified_base (121)..(121): a, c, t, or g
  modified_base (178)..(178): a, c, t, or g
tgagcttccctccgccctatggcagaaagcrgcccgccgccgcatttataaggctctcccacctaaagccatatamtggttatggtgacttcccagaakacatggcaacatgcaaatatantgcggtmtacytcccctgtbgcgcgtaggcgtctcctcccctggacgmacgggcgcngcatgttcccgccctatgactctgggccdgcgactacgggagagagctgatgacgtgaccgcgaccgctcgggbtccatggcg

SEQ ID NO: 730 - DNA, 261 bp, Artificial Sequence
  Description of Artificial Sequence: Synthetic polynucleotide
  modified_base (41)..(41): a, c, t, or g
  modified_base (121)..(121): a, c, t, or g
  modified_base (163)..(163): a, c, t, or g
  modified_base (178)..(178): a, c, t, or g
  modified_base (223)..(223): a, c, t, or g
tgagcttccctccgccctayrgmrrmmagcrscccssmscngcayttataagsctctcccwmctaaagmcatwtrmygrttatggtgacttcccasaakacatrgcwacatgcaaataymnygcgktmtrcykcccctgtbgcgcgtaggcgtctccyccccnggacgmryrggcgcngcrtkyycycscystrtgactckrggcydgcgactacsggagmgngctgatgacgtgascgcgaccgctcgsgbtccatggcg

SEQ ID NO: 731 - DNA, 261 bp, Artificial Sequence; identical to SEQ ID NO: 730
  Description of Artificial Sequence: Synthetic polynucleotide
  modified_base (41)..(41): a, c, t, or g
  modified_base (121)..(121): a, c, t, or g
  modified_base (163)..(163): a, c, t, or g
  modified_base (178)..(178): a, c, t, or g
  modified_base (223)..(223): a, c, t, or g

SEQ ID NO: 732 - DNA, 261 bp, Artificial Sequence; identical to SEQ ID NO: 730
  Description of Artificial Sequence: Synthetic polynucleotide
  modified_base (41)..(41): a, c, t, or g
  modified_base (121)..(121): a, c, t, or g
  modified_base (163)..(163): a, c, t, or g
  modified_base (178)..(178): a, c, t, or g
  modified_base (223)..(223): a, c, t, or g

SEQ ID NO: 733 - DNA, 261 bp, Artificial Sequence; identical to SEQ ID NO: 730
  Description of Artificial Sequence: Synthetic polynucleotide
  modified_base (41)..(41): a, c, t, or g
  modified_base (121)..(121): a, c, t, or g
  modified_base (163)..(163): a, c, t, or g
  modified_base (178)..(178): a, c, t, or g
  modified_base (223)..(223): a, c, t, or g

SEQ ID NO: 734 - DNA, 261 bp, Artificial Sequence; identical to SEQ ID NO: 730
  Description of Artificial Sequence: Synthetic polynucleotide
  modified_base (41)..(41): a, c, t, or g
  modified_base (121)..(121): a, c, t, or g
  modified_base (163)..(163): a, c, t, or g
  modified_base (178)..(178): a, c, t, or g
  modified_base (223)..(223): a, c, t, or g

SEQ ID NO: 735 - DNA, 253 bp, Equus asinus
tgagcttccctccgccctatggggaaaaacagctcacggcggcatttataagactcacagatctaaagccatttcacgaatagggtgacttcccacaatgcacagcgacatgcaaacatagcggggcgtgcctttcctgtaccctgtgggcatctctcctggacgcacgcgcgccgggtgttcccgcgctgtgactctaggcaagcgcttcctgggagagagttgatgacggcagcattcgggctccatggcg

SEQ ID NO: 736 - DNA, 253 bp, Equus asinus; identical to SEQ ID NO: 735

SEQ ID NO: 737 - DNA, 253 bp, Equus asinus; identical to SEQ ID NO: 735

SEQ ID NO: 738 - DNA, 253 bp, Equus caballus
tgagcttccctccgccctacgggggaaaacagcccatggctgcatttataagactcacagatctaaagccatttcacgaatagggtgacttcccacaatacacagcgacatgcaaacatagcggggcgtgcctttcctgtaccctgtgggcatctctcctggacgcacgcgcgccgggtgttcccgcgctgtgactctaggcaagcgcttcctgggagagagttgatgacggcagcattcgggctccatggcg

SEQ ID NO: 739 - DNA, 253 bp, Equus przewalskii
tgagcttccctccgccctacaggggaaagcagcccatggctgcatttataagactcacagatctaaagccatttcacgaatagggtgacttcccacaatacacagcgacatgcaaacatagcggggcgtgcctttcctgtaccctgtgggcatctctcctggacgcacgcgcgccgggtgttcccgcgctgtgactctaggcaagcgcttcctgggagagagttgatgacggcagcattcgggctccatggcg

SEQ ID NO: 740 - DNA, 257 bp, Dicerorhinus sumatrensis
tgagcttccctccgccctacggagcaaacaggccaccaggcagcctttataagactcacatgtctaaagacatttaacagttagggtgacttcccacagtacacagcgatatgcaaatatcgcggagcgtgcctccccagtctctggcgggtatcttctcgcctacacgcacgcgcgccgcgtgttcccgccctgtgtcgctaggcgggccattcatgggaggggggtgatgatgtcaacattcggcctccatggcg

SEQ ID NO: 741 - DNA, 257 bp, Dicerorhinus sumatrensis; identical to SEQ ID NO: 740

SEQ ID NO: 742 - DNA, 256 bp, Diceros bicornis
tgagcttccctccgccctacggagcaaacatgcaccaggcagcctttataagactcacatatctaaagacatttcacagttagggtgacttcccacaggacacagcgatatgcaaatatcgtggagcgtgcctccccagtctctggcgggcatcttctcgcctacacgcacgcgcgccgcgtgttcccgccctgtgacgctaggtgggcctttcatgggagagggttgatgacgtcaacattcggactccatggcg

SEQ ID NO: 743 - DNA, 256 bp, Ceratotherium simum
tgagcttccctccgccctacggagcaaacatgcgccaggcagcctttataagactcacatatctaaagacatttcacagttagggtgacttcccacaggacacagcgatatgcaaatatcgtggagcgtacctccccagtctctggcgggcatcttctcgcctacacgcacgcgcgccgcgtgttcccgccctgtgacgctaggtgggcctttcatgggagagggttgatgacgtcaacattcggactccatggcg

SEQ ID NO: 744 - DNA, 256 bp, Ceratotherium simum; identical to SEQ ID NO: 743

SEQ ID NO: 745 - DNA, 256 bp, Diceros bicornis
tgagcttccctccgctctacggagcaaacatgcaacaggcagcctttataagactcacatatctaaagacatttcacagttagggtgacttcccacaggacacagcgatatgcaaatatcgtggagcgtgcctccccagtctctggcgggcatcttctcgcctacacgcacgcgcgccgcgtgttcccgccctgtgacgctaggtgggcctttcatgggagagggttgatgacgtcaacattcggactccatggcg

SEQ ID NO: 746 - DNA, 256 bp, Tapirus indicus
tgagcttccctccgccctctgaagaaaggcggctctaagcagcatttataagactcacatatctgaagacatttcacagttagggtgacttcccacaagccacagcgacatgcaaatatcgcggaatgcgcttcccctgtctcctgtgggtatcttctcgcctggacgcacgcgcaccgcgtgttcccgccctgtgacgctaggcgggcgattcctgggagagggttgatgacgtcaaccctcgggctcaatggcg

SEQ ID NO: 747 - DNA, 256 bp, Tapirus terrestris
tgagcttccctccgccctctgaagaagggcggctctaagcagcatttataagactcacagatctgaagacatttcacagttagggtgacttcccacaagacacagcaacatgcaaatatcgcggaatgtgcttttcctgtctcgggtaggcatcttctcgcctggacgcacgcgcaccgcgtgttcccgccctgtgacgctaggcgggcgattcccgagggagggttgatgacgtcaacactcgggctccatggcg

SEQ ID NO: 748 - DNA, 256 bp, Artificial Sequence
  Description of Artificial Sequence: Synthetic polynucleotide
  modified_base (34)..(34): a, c, t, or g
  modified_base (156)..(158): a, c, t, or g
tgagcttccctccgccctayggrgmaaammdgcncmmggcrgcmtttataagactcacakatctaaagmcatttcacrrwtagggtgacttcccacarkrcacagcgayatgcaaayatmgyggrgcgtgcctyyccwgtmycykgygggcatctnnnckcctrsacgcacgcgcgccgsgtgttcccgcsctgtgackctaggyrrgcshttcmtgggagagrgttgatgacgkcarcattcggrctccatggcg

SEQ ID NO: 749 - DNA, 256 bp, Artificial Sequence
  Description of Artificial Sequence: Synthetic polynucleotide
  modified_base (34)..(34): a, c, t, or g
  modified_base (156)..(158): a, c, t, or g
tgagcttccctccgccctayggrgmaaavmdgcncmmggcrgcmtttataagactcacakatctaaagmcatttcacrrwtagggtgacttcccacarkrcacagcgayatgcaaayatmgyggrgcgtgcctyyccwgtmycykgygggyatctnnnckcctrsacgcacgcgcgccgsgtgttcccgcsctgtgackctaggyrrgcshttcmtgggagagrgttgatgacgkcarcattcggrctccatggcg

SEQ ID NO: 750 - DNA, 257 bp, Artificial Sequence
  Description of Artificial Sequence: Synthetic polynucleotide
  modified_base (33)..(33): a, c, t, or g
  modified_base (35)..(35): a, c, t, or g
  modified_base (157)..(159): a, c, t, or g
tgagcttccctccgccctmygrrgvaarvmdgncnchhrgcdgcmtttataagactcacakrtctraagmcatttmacrrwtagggtgacttcccacarkrcacagcgayatgcaaayatmgyggrrygtrcytyyccwgtmycykgygggyatctnnnckcctrsacgcacgcgcrccgsgtgttcccgcsctgtgwckctaggyrrgcshttcmtgggagrgrgktgatgaygkcarcaytcggvctccatggcg

SEQ ID NO: 751 - DNA, 257 bp, Artificial Sequence
  Description of Artificial Sequence: Synthetic polynucleotide
  modified_base (33)..(33): a, c, t, or g
  modified_base (35)..(35): a, c, t, or g
  modified_base (157)..(159): a, c, t, or g
tgagcttccctccgcyctmyrrrgvarrvmdgncnmhhrgcdgcmtttataagactcacakrtctraagmcatttmacrrwtagggtgacttcccacarkvcacagcrayatgcaaayatmgyggrrygyrcytyyccwgtmycbkgyrggyatctnnnckcctrsacgcacgcgcrccgsgtgttcccgcsctgtgwckctaggyrrgcshttcmygrgrgrgrgktgatgaygkcarcmytcggvctcmatggcg

SEQ ID NO: 752 - DNA, 257 bp, Artificial Sequence; identical to SEQ ID NO: 751
  Description of Artificial Sequence: Synthetic polynucleotide
  modified_base (33)..(33): a, c, t, or g
  modified_base (35)..(35): a, c, t, or g
  modified_base (157)..(159): a, c, t, or g

SEQ ID NO: 753 - DNA, 257 bp, Artificial Sequence; identical to SEQ ID NO: 751
  Description of Artificial Sequence: Synthetic polynucleotide
  modified_base (33)..(33): a, c, t, or g
  modified_base (35)..(35): a, c, t, or g
  modified_base (157)..(159): a, c, t, or g

SEQ ID NO: 754 - DNA, 231 bp, Galeopterus variegatus; identical to SEQ ID NO: 680

SEQ ID NO: 755 - DNA, 254 bp, Callithrix jacchus
tgagcttccctccgccctatgaggaaaagtagtcccacagacaacttataagactcccataccctaagacatttcacgattatggtgacttcccagaagacacagcgacatgcaaatattgcaggtcgtgtttcgcctgtccctcacagtcgtcttcctgccagggcgcacgcgcgctgggtttcccgccaactgacgctgggctcgcgattccttggagcgggttgatgacgtcagcgtttgaattccatggc

SEQ ID NO: 756 - DNA, 254 bp, Cebus imitator
tgagcttccctccgccctatggggaaggggtggcctacgcagaacttataagattcccacacctaaagacatttaacgattatggtgacttcccagaatacacagcgacatgcaaatattgcaggtcgtacctcgcctgtcccccacagtcgtcttcctgccagggcgcacgcgcgctgggtgtcccgccaactgacagtggactcgcgattccttggagcgggttgatgacgtcaaagttcgaatgccatggc

SEQ ID NO: 757 - DNA, 254 bp, Saimiri boliviensis
tgagcttccctccgccctatggggaagggtggtccttcgcagaacttataagattcccagtcccgaggacatttctagattatggtgacttcccagaatacacagcgacatgcaaatattgcaggtcgtgcctcgcctgtccctcactgtcgtcttcctgccagggcgcacgcgcgctgggtgtcccgccaactgacactgggctcgcgattccttggagcgggttgatgacgtcagcgttcgaattccatggc

SEQ ID NO: 758 - DNA, 254 bp, Callithrix jacchus
tgagcttccctccgccctatgaggaaaagtagtcccacagacaacttataagattcccataccctaagacatttcacgattatggtgacttcccagaagacacagcgacatgcaaatattgcaggtcgtgtttcgcctgtccctcacagtcgtcttcctgccagggcgcacgcgcgctgggtttcccgccaactgacgctgggctcgcgattccttggagcgggttgatgacgtcagcgtttgaattccatggc

SEQ ID NO: 759 - DNA, 252 bp, Aotus nancymaae
tgagcttccctccgccctacggggaagggtggtcctatacagaacttataagactcccatacccaaagacatttcacggttatggtgacttcccagaagacacagcgacatgcaaatattgtaggtcgtgcctcgcttgtccctcagtagtcttcctttcagagcgcacgcgcgctgggtgtcccgccaactgacactgggctcgcgattccttggagcgggttgatgacgtcagcgttcgaattccatggc

SEQ ID NO: 760 - DNA, 263 bp, Microcebus murinus
tgagcttccctccgccctatgaggaggaaccatcccacccagaatttataaagttcccaaatcggaagacatttcaccattagggtgatttcccacaacacatagcgacatgcaaatatctcagagcgtacctcccctgtcctatacgggcgtcaactccccagggcgggcgcgcgcgcgctgtttcccgcctgtgactcgggactctgcgcccgggattcctcggagcgggttgagaacgtcagctccggtgcttcatggcg

SEQ ID NO: 761 - DNA, 262 bp, Otolemur garnettii
tgagcttccctccgccctacgcctaaaagggcgcttgcacagaatttataaggttcccaaacagagacacatttcattattatggtgacttcccacaatgcacagcgccatgcaaatatgctaggacctgcctccccacacccgctaccttaaggtcgtcaactaaccagtgcgcgcgcgcactgcgcgtttcccgccggtgactcaatgcccgcgtttggtgggagctagttggtgacctcagttctggaggctcatggcg

SEQ ID NO: 762 - DNA, 257 bp, Papio anubis
tgagcttccctccgccctatggggaaaggtggtaccatacagaacttataagattcccatactcaaagacatttcacgattatggtgacttcccagaagacacagcgacatgcaaatattgtagggcgtcacaccccctgtccctcacagtcatcttcctgccagggcgcacgcgcgctgggtgttcccgcgtagtgacactgggcccgcgattccttggagcgggttgatgacgtcagcgttcgaattccatggcg

SEQ ID NO: 763 - DNA, 257 bp, Piliocolobus tephrosceles
tgagcttccctccgccctatggggaagggtgaggctactcagaacttataaggctcccatactcaaagacatttcacgtttatggtgacttcccagaagacatagcgacatgcaaatattgcagggcgtcacacccctgtctcttaacagtcatcttcctgccagggcgcacgcgcgctgggtgttcccgcgtagtgacactgagcccgcgattccttggagcgggttgatgacgtcagcgttcgaattccatggcg

SEQ ID NO: 764 - DNA, 257 bp, Colobus angolensis
tgagcttccctccgccctatggggaagggtggtcctccatagaacttataagactcccatactcaaagacatttcacgtttatggtgacttcccagaagacatagcgacatgcaaatattgcagggcgtcacaccccctgtcccttacagctctcttcctgccagggcgcacgcgcgctgggtgttcccgcgtagtgacactgggcccgcgattccttggaacgggttgatgacgtcagcgttcgaattacatggcg

SEQ ID NO: 765 - DNA, 256 bp, Nomascus leucogenys
tgagcttccctccgccctatggggaaaagtagttttttttagaccttataagattcccaaacccaaagacatttctcgtttatggtgacttcccagaagacatagcgacatgcaaatattgcagggcgccactcccctgtccctcacagccatcttcctgccagggcgcacgcgcgctgggtgttcccgcctagtgacactcggcccgcgattccttggagcgggttgatgacgtcagcgttcgaattccatggcg

SEQ ID NO: 766 - DNA, 256 bp, Gorilla gorilla
tgagcttccctccgccctatgggaaagggtggtcccacacagaacttataagactcccatatccaaagacatttcacggttatggtgatttcccagaacacatagcgacatgtaaatattgcagggcgccactccccagtccctcacagccatcttcctgccagggcgcacgcgcgctgggtgttcccgcctagtgacactgggcccgcgattccttggagcgggttgatgacgtcagcgttcgaattccatggcg

SEQ ID NO: 767 - DNA, 256 bp, Rhinopithecus bieti
tgagcttccctccgccctatggggaagggtggtcctacacagagcttataagactcccatactcaaagacatttctcgtttatggtgacttcccagaagccatagcgacatgcaaatattgcagggcgtcacacccctgtcccttacagccatcttcctgccagggcgcacgcgcgctgggtgttcccgcgtagtgacactgggcccgcgattccttggagcgggttgatgacgtcagcgttcgacttccatggcg

SEQ ID NO: 768 - DNA, 256 bp, Macaca fascicularis
tgagcttccctccgccctatggggaagggtggtcccacacagaacttataagattcccatactcaaagacatttctcgtttatggtgacttcccagaagacacagcgacatgcaaatattgtagggcgtcacacccctgtccctcacagtcatcttcctgccagggcgcacgcgcgctgggtgttcccgcgtagtgacactgggcccgcgattccttggagcgggttgatgacgtcagcgttcgaattccatggcg

SEQ ID NO: 769 - DNA, 256 bp, Propithecus coquereli
tgagcttccctccgccctatgagggaaaagggttctgcacagaatttataaggctcccaaatctaaaaacatttcaccattatggtgatttcccacaacacatagcgacatgcaaatatctcagagcgtacctcccctgtcctatacgggcgtcaactcgccatggcgcacgcgcgttgtgtgtttcccgcctgtgactctgggcccgcgattcctcccagcgggttgagtacgtcagctccggtgcttcatggcg

SEQ ID NO: 770 - DNA, 256 bp, Pan paniscus
tgagcttccctccgccctatgggaaagggtggtgccacacagaacttataagactcccatatccaaagacatttcacgtttatggtgatttcccagaacacatagcgacatgcaaatattgcagggcgccactcccctgtccctcacagccatcttcctgccagggcgcacgcgcgctgggtgttcccgcctagtgacactgggcccgcgattccttggagcgggttgatgacgtcagcgttcgaattccatggcg

SEQ ID NO: 771 - DNA, 256 bp, Homo sapiens
tgagcttccctccgccctatgggaaaaagtggtctcatacagaacttataagattcccaaatccaaagacatttcacgtttatggtgatttcccagaacacatagcgacatgcaaatattgcagggcgccactcccctgtccctcacagccatcttcctgccagggcgcacgcgcgctgggtgttcccgcctagtgacactgggcccgcgattccttggagcgggttgatgacgtcagcgttcgaattccatggcg

SEQ ID NO: 772 - DNA, 256 bp, Rhinopithecus roxellana
tgagcttccctccgccctatggggaagggtggtcctacacagagcttataagactcccatactcaaagacatttctcgtttatggtgacttcccagaagccatagcgacatgcaaatattgcagggcgtcacacccctgtcccttacagccatcttcctgccagggcgcacgcgcgctgggtgttcccgcgtagtgacactgggcccgcgattccttggagcgggttgatgacgtcagcgttcgaattccatggcg

SEQ ID NO: 773 - DNA, 256 bp, Macaca mulatta
tgagcttccctccgccctatggggaagggtgggcccacacagaacttataagattcccatactcaaagacctttctcgtttatggtgacttcccagaagacacagcgacatgcaaatattgtagggcgtcacacccctgtccctcacagtcatcttcctgccagggcgcacgcgcgctgggtgttcccgcgtagtgacactgggcccgcgattccttggagcgggttgatgacgtcagcgttcgaattccatggcg

SEQ ID NO: 774 - DNA, 256 bp, Chlorocebus sabaeus
tgagcttccctccgccctatggggaagggtggtcccttacagaacttataagattcccaaactcaaagacatttcacgtttatggtgacttcccagaagacatagcgacatgcaaatattgcagggcgtcacacccctctccctcacagtcatcttcctgccagggcgcacgcgcgctgggtgttctcgcgtagtgacactgggcccgcgattccttggagcgggttgatgacgtcagcgttcgaattccatggcg

SEQ ID NO: 775 - DNA, 256 bp, Macaca nemestrina
tgagcttccctccgccctatggggaaagccgatcccagccagaacttataagattcccatactcaaagacatttctcgtttatggtgacttcccagaagacacagcgacatgcaaatattgtagggcgtcacacccctgtccctcacagtcatcttcctgccagggcgcacgcgcgctgggtgttcccgcgtagtgacactgggcccgcgattccttggagcgggttgatgacgtcagcgttcgaattccatggcg

SEQ ID NO: 776 - DNA, 256 bp, Cercocebus atys
tgagcttccctccgccctatggggaaaggtggtcccacaccgaacttataagactcccatactcaaagacatttctcgtttatggtgacttcccagaagacacagcgacatgcaaatattgtagggcgtcacacccctgtccctcacagtcatcttcctgccagggcgcacgcgcgctgggtgttcccgcgtagtgacactgggcccgcgattccttgcagcgggttggtgacgtcagcgttcgaattccatggcg

SEQ ID NO: 777 - DNA, 256 bp, Mandrillus leucophaeus
tgagcttccctccgccctatggggaaaggtggtcccacacagaacttataagattcccatactcaaagacatttctcgtttatggtgacttcccagaagacacagcgacatgcaaatattgtagggcgtcacacccctgtccctcacagtcatcttcctgccagggcgcacgcgcgctggatgttcccgcgtagtgaccctgggcccgcgattccttggagcgggttgatgacgtcagcgttcgaattccatggcg

SEQ ID NO: 778 - DNA, 256 bp, Macaca mulatta
tgagcttccctccgccctatggggaagggtggtcccacacagaacttataagattcccatactcaaagacctttctcgtttatggtgacttcccagaagacacagcgacatgcaaatattgtagggcgtcacacccctgtccctcacagtcatcttcctgccagggcgcacgcgcgctgggtgttcccgcgtagtgacactgggcccgcgattccttggagcgggttgatgacgtcagcgttcgaattccatggcg

SEQ ID NO: 779 - DNA, 255 bp, Pongo abelii
tgagcttccctccgccctatgagaaagggtggtcccgtccagaacttataagattcccatacccaaagacatttcacgtttatggtgacttcccagaatgcatagcgacatgcaaatattgcagggcgtcactcccctgtccctcacagccatcttcctgccagggcgcccgcgcgctggtgttcccgcctagtgacactgggcccacgattccttggagcgggttgatgacgtcagcgctcgtattccatggcg

SEQ ID NO: 780 - DNA, 254 bp, Carlito syrichta
tgagcttccctccgccctacgcgagagggtgggtccacacagagcttataaggcttcacaagtaaagatatttcacggtgacggtgacttcccacaatacactgcgacatgcaaatatagccgggcgtgcctccccgatcccggaagagcgactcctagccagtgcgcacgcgcgctgcgtgttcgcgtcctaggtcgctgggcccgcggttcctgggagcgggtggtgacgtcagcggcccagcttcatggcg

SEQ ID NO: 781 - DNA, 252 bp, Eulemur flavifrons
tgagcttccctccgccctgccaggaaaagtttaaacacacaatttataaggttcccaaatctaaagccattttaccattatggtgatttcccacaacacatagcgacatgcaaatgtctcacagtgtacctcccctgtcctatacgggcgacgactcgtcagggcgcacgcgcactgtgtttcccgcctgtgattctgggcccgcgattcatctgagcgggttgataacgtcagctccggtgcttcatggcg

SEQ ID NO: 782 - DNA, 230 bp, Tupaia chinensis
tgagcttccctccgccttatgggggaagctgggtccactgagttcttataaggtttccagtcctagagcgattttaccattacggtgatttcccagcatccgtagctacatgcaaatagcgcggggcgcgtctctcaggtccctcccccgtgccctctcactgtacgtacccgcgtcctagggacgccgcgcccggggttcccggacgtcagcgttccgacgcaatggcg

SEQ ID NO: 783 - DNA, 255 bp, Pan troglodytes
gagcttccctccgccctatgggaaagggtggtgccacacagaacttataagattcccatatgcaaagacatttcacgtttatggtgatttcccagaacacatagcgacatgcaaatattgcagggcgccactcccctgtccctcactgccatcttcctgccagggcgcacgcgcgctgggtgttcccgcctagtgacactgggcccgcgattccttggagcgggttgatgacgtcagcgttcgaattccatggcg

SEQ ID NO: 784 - DNA, 256 bp, Artificial Sequence
  Description of Artificial Sequence: Synthetic polynucleotide
  modified_base (39)..(39): a, c, t, or g
tgagcttccctccgccctatgrgraarrgtggtycyayncagaacttataagrytcccawayyyaaagacatttcwcgwttatggtgayttcccagaabacayagcgacatgcaaatattgyagggcgtsmcwcccctgtccctyacrgycrtcttcctgccagggcgcacgcgcgctgggtgttcccgcstagtgacdctgggcccgcgattccttggagcgggttgatgacgtcagcgttcgaattccatggcg

SEQ ID NO: 785 - DNA, 256 bp, Artificial Sequence
  Description of Artificial Sequence: Synthetic polynucleotide
  modified_base (39)..(39): a, c, t, or g
  modified_base (185)..(185): a, c, t, or g
  modified_base (193)..(193): a, c, t, or g
tgagcttccctccgccctaygrgraarrvkrrkyyydynsagaryttataagrytcccadayyyaaagacatttcwcswttatggtgayttcccasaabmcayagcgacatgcaaatatygyaggkcgysmcwcscckgtcccwyacrgbcrtcwwcyykccagdgcgcacgcgcgctgsgtgtncccgcswnstgacdctgggcycgcgattcctbggagcgggttgrtgacgtcagckyysgwrytycatggcg

SEQ ID NO: 786 - DNA, 257 bp, Artificial Sequence
  Description of Artificial Sequence: Synthetic polynucleotide
  modified_base (39)..(39): a, c, t, or g
  modified_base (147)..(147): a, c, t, or g
  modified_base (185)..(186): a, c, t, or g
  modified_base (194)..(194): a, c, t, or g
  modified_base (219)..(219): a, c, t, or g
tgagcttccctccgccctaygrgrrarrvkrrkbyydynsagaryttataagrytcccadayyydaagacatttywcswttatggtgayttcccasaabmcayagcgacatgcaaatatykyaggkcgyvhcwcscckgtccywyanrgbcrtcwwcyykccagdgcgcvcgcgcgctgsgtgtnncccgcswnstgacdctgsgcycgcgattcctbngagcgggttgrtracgtcagckyysgwrykycatggcg

SEQ ID NO: 787 - DNA, 261 bp, Artificial Sequence
  Description of Artificial Sequence: Synthetic polynucleotide
  modified_base (24)..(24): a, c, t, or g
  modified_base (31)..(31): a, c, t, or g
  modified_base (39)..(39): a, c, t, or g
  modified_base (44)..(44): a, c, t, or g
  modified_base (57)..(57): a, c, t, or g
  modified_base (60)..(60): a, c, t, or g
  modified_base (75)..(75): a, c, t, or g
  modified_base (120)..(120): a, c, t, or g
  modified_base (135)..(136): a, c, t, or g
  modified_base (142)..(143): a, c, t, or g
  modified_base (145)..(148): a, c, t, or g
  modified_base (150)..(150): a, c, t, or g
  modified_base (152)..(153): a, c, t, or g
  modified_base (157)..(157): a, c, t, or g
  modified_base (161)..(161): a, c, t, or g
  modified_base (165)..(165): a, c, t, or g
  modified_base (180)..(180): a, c, t, or g
  modified_base (186)..(187): a, c, t, or g
  modified_base (189)..(189): a, c, t, or g
  modified_base (193)..(195): a, c, t, or g
  modified_base (198)..(198): a, c, t, or g
  modified_base (206)..(208): a, c, t, or g
  modified_base (223)..(223): a, c, t, or g
  modified_base (226)..(226): a, c, t, or g
  modified_base (232)..(232): a, c, t, or g
  modified_base (234)..(234): a, c, t, or g
  modified_base (236)..(236): a, c, t, or g
  modified_base (246)..(246): a, c, t, or g
  modified_base (250)..(253): a, c, t, or g
tgagcttccctccgccctaysvsnrarrvbnvkbhydbnbvswnyttataagrytyncanwybbdravmbmtttnwhsdttayggtgayttcccasaabvcayagcgacatgcaaatatnkyrgrkcgyvhywcnnchdstnnynnnndnbnnwcdncyhnycvndgcgcvcgcgcrctnbryktnncncgcnnnsdnskgacdcnnngcycgsgrttcvtbnsancgrgtngnknacgtcarhknybsnnnnycatggcg

SEQ ID NO: 788 - DNA, 273 bp, Artificial Sequence
  Description of Artificial Sequence: Synthetic polynucleotide
  modified_base (24)..(24): a, c, t, or g
  modified_base (29)..(29): a, c, t, or g
  modified_base (31)..(32): a, c, t, or g
  modified_base (34)..(34): a, c, t, or g
  modified_base (37)..(37): a, c, t, or g
  modified_base (39)..(39): a, c, t, or g
  modified_base (44)..(44): a, c, t, or g
  modified_base (57)..(57): a, c, t, or g
  modified_base (60)..(60): a, c, t, or g
  modified_base (63)..(63): a, c, t, or g
  modified_base (75)..(75): a, c, t, or g
  modified_base (117)..(117): a, c, t, or g
  modified_base (120)..(120): a, c, t, or g
  modified_base (131)..(141): a, c, t, or g
  modified_base (146)..(168): a, c, t, or g
  modified_base (171)..(172): a, c, t, or g
  modified_base (186)..(187): a, c, t, or g
  modified_base (192)..(195): a, c, t, or g
  modified_base (199)..(201): a, c, t, or g
  modified_base (204)..(210): a, c, t, or g
  modified_base (212)..(212): a, c, t, or g
  modified_base (216)..(216): a, c, t, or g
  modified_base (218)..(220): a, c, t, or g
  modified_base (233)..(238): a, c, t, or g
  modified_base (241)..(241): a, c, t, or g
  modified_base (243)..(248): a, c, t, or g
  modified_base (257)..(265): a, c, t, or g
tgagcttccctccgccytrysvsnvrrrnbnnbnhhnbnbvswnyttataarrytyncanhhnbdrrvmbmtttnwhbdtkabggtgayttcccabmabvcrywgckmcatgyaaanrknbhvsrdysyvnnnnnnnnnnnchdvnnnnnnnnnnnnnnnnnnnnnnncvnngygsvckckcryknnvyktnnnncgcnnnsdnnnnnnnsngwynsnnnrcycrsgdttsvnnnnnnckngnnnnnnacstsarhnnnnnnnnnhmatggcg

SEQ ID NO: 789 - DNA, 273 bp, Artificial Sequence; identical to SEQ ID NO: 788
  Description of Artificial Sequence: Synthetic polynucleotide
  modified_base (24)..(24): a, c, t, or g
  modified_base (29)..(29): a, c, t, or g
  modified_base (31)..(32): a, c, t, or g
  modified_base (34)..(34): a, c, t, or g
  modified_base (37)..(37): a, c, t, or g
  modified_base (39)..(39): a, c, t, or g
  modified_base (44)..(44): a, c, t, or g
  modified_base (57)..(57): a, c, t, or g
  modified_base (60)..(60): a, c, t, or g
  modified_base (63)..(63): a, c, t, or g
  modified_base (75)..(75): a, c, t, or g
  modified_base (117)..(117): a, c, t, or g
  modified_base (120)..(120): a, c, t, or g
  modified_base (131)..(141): a, c, t, or g
  modified_base (146)..(168): a, c, t, or g
  modified_base (171)..(172): a, c, t, or g
  modified_base (186)..(187): a, c, t, or g
  modified_base (192)..(195): a, c, t, or g
  modified_base (199)..(201): a, c, t, or g
  modified_base (204)..(210): a, c, t, or g
  modified_base (212)..(212): a, c, t, or g
  modified_base (216)..(216): a, c, t, or g
  modified_base (218)..(220): a, c, t, or g
  modified_base (233)..(238): a, c, t, or g
  modified_base (241)..(241): a, c, t, or g
  modified_base (243)..(248): a, c, t, or g
  modified_base (257)..(265): a, c, t, or g

SEQ ID NO: 790 - DNA, 201 bp, Mus musculus
tgagcttcctccgcccactttcaggatgtagaccggccgccactataaggctcgaaagaggaataaatttttcgtttagggtgatttcccacaaagcacagcgcgtaatttgcatgcgctctaccccaggctcctgtgctagacaagaagcccgcgcatccgggcaagggatgatgacgtcgtccttcaagagcgatggcg

SEQ ID NO: 791 - DNA, 201 bp, Mus musculus; identical to SEQ ID NO: 790

SEQ ID NO: 792 - DNA, 201 bp, Mus musculus; identical to SEQ ID NO: 790

SEQ ID NO: 793 - DNA, 201 bp, Mus musculus; identical to SEQ ID NO: 790

SEQ ID NO: 794 - DNA, 201 bp, Mus musculus; identical to SEQ ID NO: 790

SEQ ID NO: 795 - DNA, 201 bp, Mus musculus; identical to SEQ ID NO: 790

SEQ ID NO: 796 - DNA, 201 bp, Mus musculus
tgagcttcctccgcccacttttagggtgtagaccggccgccactataaggctcgaaagaggaataaattttacgtttagggtgatttcccacaaagcacagcgcgtaatttgcatgtgctctatcccaggctcctgtgccagacaagaagcccgcgcatccgggcaagggatgatgacgtcgtccttcaagagcgatggcg

SEQ ID NO: 797 - DNA, 201 bp, Mus musculus; identical to SEQ ID NO: 796

SEQ ID NO: 798 - DNA, 201 bp, Mus musculus
tgagcttcctccgcccactttcagggtgtagaccggccgccactataaggctcgaaagaggaataaatttttcgtttagggtgatttcccacaaagcacagcgcgtaatttgcatgtgctctatcccaggctcctgtgccagacaagaatcccgcgcatccgggcaagggatgatgacgtcgtccttcaagagcgatggcg

SEQ ID NO: 799 - DNA, 201 bp, Mus spretus
tgagcttcctccgcccacttccagtgtgtagaccggccgccactataaggttcgaaagaggaataaatttttcgtttagggtgatttcccacaaagcacagcgcgtaatttgcatgtgctctaccccgggctcctgtgctagacaagaagcccgcgcatccgggcaagggatgatgacgtcgtccttcaagagcgatggcg

SEQ ID NO: 800 - DNA, 201 bp, Mus spicilegus
tgagcttcctccgcccactttcagtgtgtagaccggccgccactataaggttcgaaagaggaataaattttacatttagggtgatttcccacaaagcacagcgcgtaatttgcatgtgctctaccccaggctcctgtgctagacaagaagcccgcgcatccgggcaagggatgatgacgtcgtccttcaagagcgatggcg

SEQ ID NO: 801 - DNA, 201 bp, Mus spicilegus; identical to SEQ ID NO: 800

SEQ ID NO: 802 - DNA, 201 bp, Mus caroli
tgagcttcctccgcccacttggagggtggagaccggccgccactataaggctcgaaagaggaataaattttacgtttagggtgatttcccacaaagcacagcgcgtaatttgcatgtgctctatcccaggctccagtgccagacaagaagcccgcgcatccgggcaagggatgatgacgtcgtccttcaagagcgatggcg

SEQ ID NO: 803 - DNA, 201 bp, Mus caroli; identical to SEQ ID NO: 802

SEQ ID NO: 804 - DNA, 201 bp, Mus minutoides
tgagcttcctccgcccacttggagggtgtacaccgggcgccactataaggttcgaaagaggaataaatttctcgcttacggtgacttcccacaaagcacagcgcgtaatttgcatgatcttgatcccaggcttctgttccagacaagaagcctgcgcatccgggcaagggatggtgacgtcgtccttcaagcgcgatggcg

SEQ ID NO: 805 - DNA, 201 bp, Mus minutoides; identical to SEQ ID NO: 804

SEQ ID NO: 806 - DNA, 201 bp, Mus minutoides
tgagcttcctccgcccacttggagggtgtacaccgggcgccactataaggttcgaaagatgaataaatttctcgcttacggtgacttcccacaaagcacagcgcgtaatttgcatgatcttgatcccaggcttctgttccagacaagaagcctgcgcgtccgggcaagggatggtgacgtcgtccttcaagcgcgatggcg

SEQ ID NO: 807 - DNA, 208 bp, Mus Pahari
tgagcttcctccgcccacttgaaggctgtagaccggccgccactataaggctcgaaagaggaataagtttttcgcttacggtgacttcccacaaagcacagcgcgtaatttgcatgtactctatcccaggcttcctgttccagactagaagcccgcgcatccgggcaagggacgatgacatcatccccatccctccagcgcgatggcg

SEQ ID NO: 808 - DNA, 208 bp, Mus Pahari; identical to SEQ ID NO: 807

SEQ ID NO: 809 - DNA, 201 bp, Rattus rattus
tgagcttcccccgcccacttggaaggtggagacctgccgccataataagactccaaaagagagtgaatttaacacttgcggtgacttcccacaaagcacagcgtgtaatttgcatgcgctctagcccaggctccagctccgaacgagaagcccgcgcatcccggcaaaggatgatgacgtcgtccttcaagcgctatggcg

SEQ ID NO: 810 - DNA, 201 bp, Rattus rattus; identical to SEQ ID NO: 809

SEQ ID NO: 811 - DNA, 201 bp, Rattus norvegicus
tgagcttcccccgcccactaggagtgtgaagacctgccgccataataagactccaaaagacagtgaatttaacacttacggtgacttcccacaaagcacagcgtgtaatttgcatgcgctctagcccaggctccagctccggaccagaagcccgcgcatcccggcaaagggtgatgacgtcgtccttcaagcgctatggcg

SEQ ID NO: 812 - DNA, 201 bp, Rattus norvegicus; identical to SEQ ID NO: 811

SEQ ID NO: 813 - DNA, 200 bp, Apodemus sylvaticus
tgagcttcctccgcccacctgagccggtgtggtgggcaactaatataagactccaacatggaataaattttacgcttatggtgatttcccacaaagcacagcgcacaatttgcatgtaatctatcccagttcctactctaaacctggagcccgcgcatccgggcaaggggtgatgacgtcgtccctccagcgcgatggcg

SEQ ID NO: 814 - DNA, 238 bp, Apodemus speciosus
tgagcttcctccgcccacttgcagcgtggaggtcgrcactaatataagcctccaaagcggaataaattttacgctcatggtgacttcccacaaagcacagcgcataatttgcatgtgtccaatcctggttcctgctccagacataatttgcatgtgccctatcctggttcctgctccagacaagaagcccgcgcctccgggcaaggagtgatgacgtcgtccctccagcgcgatggcg

SEQ ID NO: 815 - DNA, 200 bp, Grammomys surdaster
tgagcttcctccgcccacttacacggcggcgatcggcgaaacttataagagtcgaaggcggcataaagtttaagcttatggtgacttcccacaaagcacagcgcgtaatttgcatgtactttatcccaggctctttctcccgaccagtagcctcacatccgggcaaggggtgatgacgtcgtctatcaagcgcgatggcg

SEQ ID NO: 816 - DNA, 200 bp, Arvicanthis niloticus
tgagcttcctccgcccatttttcgtttcgaggttggcgaaaattataagactcgaaagcggcacaaagtttaagcttatggtgatttcccacaaagcacagcgcgtaatttgcatgtgttttatcccaggctcttctccagaccaataacctgcacatccgggcaaggggtgatgacgtcgtccatcaagcgctatggcg

SEQ ID NO: 817 - DNA, 200 bp, Mastomys coucha
tgagcttcctccgcccactgcgaaacacatgagcggcaatcattataagcctccaaagcggaaaatctttttcgattatggtgacttcccacaaagcatagcgctaatttgcatgcgctttatctcagtctcctgctacaggcaagaagcccgcgcatccgggcaagaaatgatgacgtcgtccctcaagcgcgatggcg

SEQ ID NO: 818 - DNA, 204 bp, Cricetulus griseus
tgagcttcctccgcccactacagcctggtgaatggcgggctttataaggctccggagagaaagcgctttctcagttatggtggtttcccacaaggcacagcgcacactttatttgcatgcgatctagcgcaggctcccgctccagacaagaagcccgcgcttttcggctgcttatgatgacgtcgggcctcaagcgccatggcg

SEQ ID NO: 819 - DNA, 204 bp, Cricetulus griseus; identical to SEQ ID NO: 818

SEQ ID NO: 820 - DNA, 204 bp, Cricetulus griseus; identical to SEQ ID NO: 818

SEQ ID NO: 821 - DNA, 204 bp, Cricetulus griseus; identical to SEQ ID NO: 818

SEQ ID NO: 822 - DNA, 204 bp, Cricetulus griseus; identical to SEQ ID NO: 818

SEQ ID NO: 823 - DNA, 212 bp, Mesocricetus auratus
tgagcttcctccgcccggcgtggcccggcggcgggcgaactatataagcctccgcggaggaagcgctttctcggttagggtggtttcccacaagcctcagcgcacagcctctttgcatacgctcccgccgcccccgggctcctccctctccgcacaagaagcccgcgcatttcgactgcggatgatgacgtcgggcctcgagcgccatggcg

SEQ ID NO: 824 - DNA, 202 bp, Phodopus sungorus
tgagcttcccccgcccacgacgccggtggggagggcgaaccttataagcgtcggaagagaaagctattttgcagttatggtggtttcccacaaggcacagcgtacagttatttgcatacgctccagcccgctcccgctccggactagaaagcccgcgaatttcggctgtggatgatgacgtcggacctcaagcgccatggcg

SEQ ID NO: 825 - DNA, 213 bp, Peromyscus maniculatus
tgagcttcccccgcccgccagagggcggtggccggcgagcttaataagcctcggaggcgggacgcctgttacagtgacggtggtttcccacaaagcacagcgcggcggtcttgatttgcatgcgcctttatgcccgcctcccgctccggagaagaagcccgcgcatcccggctgggctgggggtgatgacgtcagggctcgagcgccatggcg

SEQ ID NO: 826 - DNA, 213 bp, Peromyscus maniculatus
tgagcttcccccgcccgccggagggcggtgggcggcgagcttaataagcctcggaggcgggacgcctgttacagtgacggtggtttcccacaaagcacggcgcggcggtcttgatttgcatgcgcctttatgcccgcctcccgctccggagaagaagcccgcgcatcccggctgggctgggggtgatgacgtcagggctcgagcgccatggcg

SEQ ID NO: 827 - DNA, 213 bp, Peromyscus polionotus
tgagcttcccccgcccgccgcaaagcggtggccggcgagcttaataagcctcggaggcgggacgcctgttacagtgacggtggtttcccacaaggcacggcgcggcggcctcgatttgcatgcgcttttatgcccgcctcccgctccggagaagaagcccgcgcatcccggctgggctgggggtgatgacgtcagggctcgagcgccatggcg

SEQ ID NO: 828 - DNA, 213 bp, Peromyscus leucopus
tgagcttcccccgcccgccgcaaagcggtggccggcgagcttaataagcctcggaagcgggacgcctgttacagtgacggtggtttcccacaaagcacggcgcggcggtcttgatttgcatgcgcctttatgcccgcctcccgctccggagaagaagcccgcatatcccggctgggctgggggtgatgacgtcaggactcgagcgccatggcg

SEQ ID NO: 829 - DNA, 208 bp, Peromyscus californicus
tgagcttcccccgcccaccggagagcggcggccggcgaacttaataggccgtgggagcggaacgcacttttcagtgatggtggtttcccacgaggcacagcgcggcggcccttatttgcatgcgcttctattcccgcctcccgccccagagaagaagcccgcgcatcccggctggggatgatgacgtcagggctcgagcgccatggcg

SEQ ID NO: 830 - DNA, 205 bp, Onychomys torridus
tgagcttcccccgcccaccgaggtggtctggctggcgaatttaataaggctccgaagagcaatgcattttacagtgacggtggtttcccacaaggcacggcgcggcctttatttgcatgcgcttctgttcccgcctcccgctccaaacaagaagcccgcgcatcccggctggggatgatgacgtcagggctcgagcgccatggcg

SEQ ID NO: 831 - DNA, 205 bp, Peromyscus attwateri
tgagcttcccccgcccgccggaagagagtggccggcgagcttaataagcctcccaagcggaccgcattttacaatgatggtggtttcccacaaggcacagcgcggtctttatttgcatgcgcttctattcccgcctcccgctcccgagaagcagcccgcgcatcccggctggcgatgatgacaccagggctcgagcgccatggcg

SEQ ID NO: 832 - DNA, 202 bp, Sigmodon hispidus
tgagcttcccccgcccggggggctgttcttggtgaatagccttataaagctgcaaagcgattcgtattttacggttatggtggtttcccataagatattgcgcgccgtttatttgcatggctcttagccccacctcccgccacaaactggaagtcggcgcttctcggctgtgcatgatgacgtcagagttcgagcgccatgg

SEQ ID NO: 833 - DNA, 201 bp, Acomys cahirinus
tgagcttcctccgcccagcggcgaagggcgggcagccacctttataagactccagagccgaatgcatttcacagttgtggtggtttcccatgaggcacagcgcgctatttgcatgcgctttagcccgggctccggcaatggaataagaaatcccgcgcatccgggtgagggatgacgacgtcaccctcaagcgctatggcg

SEQ ID NO: 834 - DNA, 201 bp, Acomys russatus
tgagcttcctccgcccagcggcgagaggtggtcagccacgtttataagactccagagccgagtgcatttctcagttgtggtggcttcccatgaggcacagcgcgctatttgcatgcgctctagcccgggctccggctctggaataaaaaatcccgcgcatccgggtgagggatgacgacgtcaccctcaagcgctatggcg

SEQ ID NO: 835 - DNA, 193 bp, Psammomys obesus
tgagcttcccccgcccgccgaagaagtgggggagaccgaacttataagacacagaaggcaacaaacttttcagttgcggtggcttcccacaaggcacagcgctttatttgcatgcgcgctaaccggggcccctactaaaaagcccgcgcatgcgcggcgcgggatgatgacgtcagccctcgagcgcgatggc

SEQ ID NO: 836 - DNA, 194 bp, Rhombomys opimus
tgagcttcccccgcccgccggagtcgtgggggcgagcggctttataagactcagaagggaacaaacttttcagatgcggtggcttcccacaaggcacagcgctttatttgcatgcgcgctaaccggggcccctactaaaaagcccgcgtatgtccggcgcgggatgatgacgtcggcccccgagcgcgatggcg

SEQ ID NO: 837 - DNA, 194 bp, Meriones unguiculatus
tgagcttcccccgcccgcggaggctctcggagagcgcggctttataagactcagaagggaacaaatttttcagttgcggtggcttcccacaaggcacagcgctcatttgcatgcgctctaacctggggcccttactaaaaagcccgcgcgtgtccggcgcgggatgatgacgtcagcccccgagcgcgatggcg

SEQ ID NO: 838 - DNA, 194 bp, Meriones unguiculatus; identical to SEQ ID NO: 837

SEQ ID NO: 839 - DNA, 194 bp, Meriones unguiculatus; identical to SEQ ID NO: 837

SEQ ID NO: 840 - DNA, 194 bp, Meriones unguiculatus; identical to SEQ ID NO: 837

SEQ ID NO: 841 - DNA, 194 bp, Meriones unguiculatus; identical to SEQ ID NO: 837

SEQ ID NO: 842 - DNA, 200 bp, Cricetomys gambianus
tgagcttcctccacccgccgggcagcttcggctggagcgccttataagactccaaagccaggtccatctatgagttagggtgttttcccacaaggcatagcgtgctgctgatttgcatgtgcccgagccagtgctcccgatcttgccagcccgcgcttcccggcgaggggatgatgacgtcatcctcaagcgcgatggcg

SEQ ID NO: 843 - DNA, 225 bp, Microtus agrestis
tgagcttcctccgcccgccgagaaggcggggcggcggcgctaaaaggctccggggcggcccggacttataagttacggtggcttcccaggaggcgcagcgccgcacatttgcatggccccaccccagacgggaagcccacgccgcttatttgcgtgtccccgccccagacgggaagcccgcgctgctcggctgcggtggtgacgtcggcctctcgcgccatggcg

SEQ ID NO: 844 - DNA, 225 bp, Microtus agrestis; identical to SEQ ID NO: 843

SEQ ID NO: 845 - DNA, 225 bp, Microtus agrestis
tgagcttcctccgcccgccgagaaggcgaggcggcggcgctaaaaggctccggggcggcccggacttataagttacggtggcttcccaggaggcgcagcgccgcacatttgcatggccccaccccagacgggaagcccacgccgcttatttgcgtgtccccgccccagacgggaagcccgcgctgctcggctgcggtggtgacgtcggcctctcgcgccatggcg

SEQ ID NO: 846 - DNA, 225 bp, Microtus oeconomus
tgagcttcctccgcccgccataaaaggcggggcggcagcgctaaaaggctccggggccgccgggacttcacagttacggtggcttcccacgaggcgcagcgctgtcatttgcatggccccgccccagacaggaagcccgcgctgctcatttgcgtgtccccgccccagacgggaagcccgcgctgcacggccgcggtggtgacgtcggcctctcgcgccatggcg

SEQ ID NO: 847 - DNA, 224 bp, Microtus fortis
tgagcttcctccgcccgccgggaaggcggggcggcggcgctaaaaggctccggggccgcccggacttcacagttacggtggcttcccacgaggcgcagcgctgtcatttgcatggccccgccccagacgggaagcccgcgctgctcatttgcgtggccccgccccagacgggaagcccgcgctgctcggccgcggtggtgacgtcggcctctcgcgccatggcg

SEQ ID NO: 848 - DNA, 224 bp, Microtus arvalis
tgagcttcctccgcccgccgggaaagcggggcggcggcgctaaaagagtccagggcggcccggacttatcagttacggtggcttcccgcgaggcgcagcgccgctcatttgcatggccccaccccagagggaagcccgcgccgctcatttgcatggccccgccccggacgggaagcccgcgctgcctggccgcggtggtgacgtcggcctctcgcgccatggcg

SEQ ID NO: 849 - DNA, 248 bp, Marmota marmota
tgagcttccctccgccctatgaaaggggctcgtcacaagcagagtttataaggctcccatgtgtacagccatttctcggtcatggtaactacccacaacacacagcgatatgcaaatatagcagagagtgtcttcccgcgcgcgcctggtcgtcttcgcgccggcgcgctgcgtggagcggaactatgacagagaccctgcgattcctgggagctggctgatgacgtcagtgtctaacctccatggcg

SEQ ID NO: 850 - DNA, 248 bp, Marmota marmota; identical to SEQ ID NO: 849

SEQ ID NO: 851 - DNA, 248 bp, Marmota himalayana
tgagcttccctccgccctatgaaaggggctcatcacaagcagagtttataaggctcccatgtgtacagccatttctcggtcatggtaactacccacaacacacagcgatatgcaaatatagcagagagtgtcttcccgcgcgcgcctggtcgtcttcgcgccggcgcgctgcgtggagcggaactatgacagagaccctacgattcctgggagctggctgatgacgtcagtgtctaacctccatggcg

SEQ ID NO: 852 - DNA, 248 bp, Marmota monax
tgagcttccctccgccctatgaaaagaactcatcacaagcagagtttataaggctcccatgtgaagagccatttctcggtcatggtaactacccacaacacacagcgatatgcaaatatagcagagagtgtcttcccgcgcgcgcctggtcgtcttcgcgccggcgcgctgcgtggagcggaactatgacagagaccctgcgattcctgggagctggctgatgacgtcagtgtctaacctccatggcg

SEQ ID NO: 853 - DNA, 248 bp, Marmota monax; identical to SEQ ID NO: 852

SEQ ID NO: 854 - DNA, 247 bp, Marmota flaviventris
tgagcttccctccgccctgtgaaaggaactcatcacaagcagagtttataaggctcccatgtgtacagccatttctcggtcatggtaactacccacaacacacagcgatatgcaaatatagcagagagtgtcttcccgcgcgcgcctggtcgtcttcgcgcccgcgcgctgcgtggagcggaactgtgacagagaccctgcgattcctgggagctggctgatgacgtcagtgtctaacctccatggc

SEQ ID NO: 855 - DNA, 248 bp, Spermophilus dauricus
tgagcttccctccgccctatgaaagggactcctctcaagcagagtttataaggctcccatgtgtacagccatttctcggtcatggtaactacccacaacacacagcgatatgcaaatatagcagagagtgtcttcccgcgcgcgcctggtcgtctcggcgccggcgcgctgcgtggggcggaactgtgacagagaccctgcgattcctggtagctggctgatgacatcagtgtctaacctccatggcg

SEQ ID NO: 856 - DNA, 248 bp, Ictidomys tridecemlineatus
tgagcttccctccgccctatgaaagggactccgcacaagcagagtttataaggctcccatctgtacagccatttctcggtcatggtaactacccacaacacacagcgatatgcaaatatagcagagcgtgtcttcccgcgcgcgcctggtcgtctcggcgccggcgcgctgcgtggggcggaactgtgacagagaccctgcgattcctgggagctggctgatgacatcagtgtctaacctccatggcg

SEQ ID NO: 857 - DNA, 248 bp, Ictidomys tridecemlineatus; identical to SEQ ID NO: 856

SEQ ID NO: 858 - DNA, 248 bp, Cynomys gunnisoni
tgagcttccctccgccctatgaaagagactcctctcaagcagagtttataaggctcccgtgtgtacagccatttctcggtcatggtaactacccacaatacacagcgatatgcaaatatagcagagagtgtcttctcgcgcgcgcctggtcttctcggcgccggcgcgctgcgtggggcggaactgtgacagagaccctgcgattcctgggagctggctgatgacgtcagtgtctaacctgcatggcg

SEQ ID NO: 859 - DNA, 248 bp, Urocitellus parryii
tgagcttccctccgccctatgaaagggaagctgctcaagcagagtttataaggctcccatgtgtacagccatttctcggtcatggtaactacccacaacacacagcgatatgcaaatatagcagagagtgtcttcccgcgcgcgcctggtcgtctctgcgccggcgcgctgcgtggagcggaactgtgacagagaccctgcgattcctgggagctggctgatgacatcagtgtctaacctccatggcg

SEQ ID NO: 860 - DNA, 254 bp, Sciurus carolinensis
tgagcttccctccgccctatgagggaaggtaaggtcaagcagaacttataaggctcccaaatgtacagacatttatcggtcatggtaactacccacaacacacagcgatatgcaaatatagcagagcgtgcctcctgcacgggccggtcgtcttctcgccggagcgcaggcgcgctgcgtggtgggggactgtgaccctgagcctgcgattcctgggagcgggctgatgacgtcagcgtctgggctccatggcg

SEQ ID NO: 861 - DNA, 254 bp, Sciurus carolinensis; identical to SEQ ID NO: 860

SEQ ID NO: 862 - DNA, 254 bp, Sciurus vulgaris
tgagcttccctccgccctatgagggaagatgagctcgagcagaacttataaggctcccaaatgtacagacatttatcggtcatggtaactacccacaacacacagcgatatgcaaatatagcagagcgtgcctcctgcacgggccggtcgtcttctcgccggagcgcaggcgcgctgcgtggtgcgggactgtgaccctgagcctgcgattcctgggagcggactgatgacgtcagcgtctgagctccatggcg

SEQ ID NO: 863 - DNA, 254 bp, Xerus inauris
tgagcttccctccgccctatgagacaaacgaatctcacgcagaacttataaggctctcatatttacagacatttcttggtcatggtaactacccacaatacatagcgatatgcaaatatagcagagtattcctccccgctcgcgtccggtcaacttctcgcctgagcgcaggcgcgctgtgtagtcggtgactaaacttgagcctgctattcctgggagcgggctgatgacatcagcatctaacctccatggcg

SEQ ID NO: 864 - DNA, 257 bp, Aplodontia rufa
tgagcttccctccgccctatgaaacgaaaaacgctggagcagaacttataaggatcccgtatctacagatatttcacgattatggtgacgacccacaacacacagcgatatgcaaatatcacggggtgtgctttccttctctcgtccggtcagcgtctcacccgggcgcaggcgcactgagtggtccagggcctgtgaccctgagctagggattcctgggagcaagttggtgacgtcagctttagacgtcaatggcg

SEQ ID NO: 865 - DNA, 254 bp, Pedetes capensis
tgagcttccctccgccctatagaagaaagcgaccttgggcaggacttataaggctcccaggagtcaagacattttttgctcatggtgacttcccacaacgcaaagcgtcatgcaaatattattggtgcgtttctttgttccagactactggacttctagccggggcgcacgcgcgctgcgtggtgcagcgtgtgacccggaacccgcgattattgggagcgagttaatgacgtcagcgtttgaacttcatggcg

SEQ ID NO: 866 - DNA, 238 bp, Muscardinus avellanarius
tgagcttccctccgccctacgtgaaagccggctgccgggcagcccttataaggctctcgtacctagagacatttccagatcatggtgactacccataacgcacagcgacatgcaaatttcatgtaaagcgcctccctctgctcctcccacgcctctgtcgagccacagcgttcccgccacagcgttcccgcggtccccgcgagcgggtggatgacgtcagcacctggacgccatggcg

SEQ ID NO: 867 - DNA, 245 bp, Glis glis
tgagcttccctccgccctatggggaaagctgggcgtgacgagcgcttataaggctctcgtacctaaagacatttcacggtcatggtgactacccacaacgcacagcgacatgcaaatttcgtggagtgtgcctccctcctctagtaccgcgtcctctcttccgggcgcacgcgacgcgttcccgccaccgcgcacgcgtggttcctgggagcgggctggtgacgtcatcactggacgccatggcg

SEQ ID NO: 868 - DNA, 264 bp, Graphiurus murinus
tgagcttccctccgccctatggggaaagctgggctcaagccgagcttataaggctctcgtaccgaaggacatttcacggtcatggtgactacccacaacacacagcgatatgcaaatctcgtagcgtgtgcttcccagcgcgtgtcctgcgtcttttctctcccgggcgcacgcgcgcacgcgcgcacgcgaagcgttcccgccacagcgcccccgcggttcctgggagcgggttgatgacgtcagcatttgtacgccatggcg

SEQ ID NO: 869 - DNA, 237 bp, Tympanoctomys barrerae
tgagcttccctccaccctatgaaataaaccagccacaaacggaaactataagaggtccaaacctcagtgtactctatggttagggtgactgcccacaatacatagcgatatgcagatttcctccccaatccggcccgccgggccctccctagagcgcatgcgctgcaggtccgcggcagagcactgggcgggcgatccggggagcgggttgatgacgtcagcttttgaacaccatgg

SEQ ID NO: 870 - DNA, 236 bp, Octomys mimax
tgagcttccctccaccctatgaaagaatctagccacaaccggaaactataagaggtccaaagctcagtgtactctatgattagggtgacttcccacaatacatagcgatatgcagatttcctcagtctatcccgctgggccctccctagagcgcatacgctgcaggtctacggccgagcactgggcgggcgatcccgggagcgagttgatgacgtcagcgtttgaactccatggcg

SEQ ID NO: 871 - DNA, 238 bp, Octodon degus
tgagcttccctccaccctatgaaggaagttagtcacaaacgcaaattataagaggtccaaagctcagtgtactctatggttagggtgacttcccacaatacatagcgatatgcagatttcttccccagtctggcccgctgggccctccctagagcgcatgcgctgcaagtccacggcggagcaccgggcgggcgatcccggagcgggttgatgacgtcagcgtttgaactccatggcg

SEQ ID NO: 872 - DNA, 241 bp, Ctenomys sociabilis
tgagcttccctccaccctatgaaacggactaattacaaacggaacctataagaggtccaaagcgcagtgtactttatgatcagggtgacttcccacaatacatagcgatatgtagatttcttccccgatgtgggccggccgggtcctccctagagcgcatgcgccgcagatccactgcaaaggactggtcggccgattccctggagcgggttgatgacattagcatttgaactccatggcg

SEQ ID NO: 873 - DNA, 249 bp, Dolichotis patagonum
tgagcttccctccgccctataaacaaaaaggtttcaaagctacgcttataaggctcccaaatgtcagtatattttttggtcacggcgacttcccacaatgcgtagcgatatgtagatattgcaggaatacctcccagttctggtcccgttagctctttgctaggacgcacgcgctgcaggttcccagcctgtgattgggccagcgattccgggagcgagttgatgacgtcagcgtttgaactccatggc

SEQ ID NO: 874 - DNA, 250 bp, Cavia tschudii
tgagcttccctccgccctatgagaaagaaaggctcaaacctagccttataaggctcccaaatgtcggtatattttttggttatggtgacttcccacaatgcatagcgatatgtagatattgccaggagtacctcccacttctggtcctgtcagctcttttctaggacgcgcgcgctgcaggtttccagcctgtgattgggccagcaattccgggaatgaattgatgacgtcagcgtttgaattccatggc

SEQ ID NO: 875 - DNA, 250 bp, Cavia porcellus; identical to SEQ ID NO: 874

SEQ ID NO: 876 - DNA, 250 bp, Hydrochoerus hydrochaeris
tgagcttccctccgccctatgaaataaggtttcctaaagcgaaacttttaagactcacaaacctcaatttattttttgatcacggtgacttcccacaatgcataacgatatgtagatattgcaaggcgtacctcccacttgtgggcctgtccgctctttgctaggacgcacgcgccgcaggttcccagcctgtgattgggccagcgattccgggagcgaattgatgacgtcagcgtttgaactccatggc

SEQ ID NO: 877 - DNA, 250 bp, Hydrochoerus hydrochaeris
tgagcttccctccgccctatgaaataaggcttcctaaagcgaaacttttaagactcacaaacctcaatttattttttgatcacggtgacttcccacaatgcataacgatatgtagatattgcaaggcgtacctcccacttgtgggcctgtccgctctttgctaggacgcacgcgccgcaggttcccagcctgtgattgggccagcgattccgggagcgaattgatgacgtcagcgtttgaactccatggc

SEQ ID NO: 878 - DNA, 250 bp, Hydrochoerus hydrochaeris
tgagcttccctccgccctatgaaataaggtttcctaaagcgaaacttttaagactcacaaacctcaatttattttttgatcacggtgacttcccacaatgcataacgatatgtagatattgcaaggcgtacctcccacttgtgggcctgtccgttctttgctaggacgcacgcgccgcaggttcccagcctgtgattgggccagcgattccgggagcgaattgatgacgtcagcgtgtgaactccatggc

SEQ ID NO: 879 - DNA, 249 bp, Hydrochoerus hydrochaeris
tgagcttccctcgccctatgaaataaggtttcctaaagcgaaacttttaagactcacaaacctcaatttattttttgatcacggtgacttcccacaatgcataacgatatgtagatattgcaaggcgtacctcccacttgtgggcctgtccgttctttgctaggacgcacgcgccgcaggttcccagcctgtgattgggccagcgattccgggagcgaattgatgacgtcagcgtttgaactccatggc

SEQ ID NO: 880 - DNA, 251 bp, Cuniculus paca
tgagcttccctccgccctatgaaaggaaacattcccaacttacacttataaggactccaaatctcagtatatttttacggtcacggtgacttcccacaagacacagcgatatgtagatatcgcgaggagtacctcccacttctggtcccgccagctctttgctagggcgcacgcgctgtaggttcacagcctgtgattgggcccgcgattccgggagcgaattgatgacgtcggcgtgtgacctccatggc

SEQ ID NO: 881 - DNA, 250 bp, Dasyprocta punctata
tgagcttccctccgccctaccaaggaacaggtctcaaagagacacttataaggatcccaaatccctgtatattttttgatcacggtgacttcccacaagacacagcggtatgtagatatcacgaggagtaccgcccagttttggtcctgtcagctctttgctagggcgcaagcgctacaggtcaaccgcctgtgattgggcctgggattccggaggcgaattggtgacgtcagcgtttgaactccatggc

SEQ ID NO: 882 - DNA, 237 bp, Dinomys branickii
tgagcttccctccaccctatgaaagcaaaggctctcgaccagaatttataagaagccgaaaccttggtatactttttgatcatggtgatttcccacaatacacagcgatatgcagatatcgcgaggagcccctcccggttctgttcctgccacggctcactaaagcgcatgcgctgcaggtccgatgcgtgatattcctgggagcgagttggtgacgtcagtttgaactccatggcg

SEQ ID NO: 883 - DNA, 252 bp, Erethizon dorsatum
tgagcttccctccgccctatggaagcagaagttctcaaccagaacttataagaggcccaaatctcagtatattttttggtcacggtgacttcccacaatacacagcgatatgtagatatcgcgaggagcacctcccagttctggtcctgtcagctcctcagtagggcgcatgcgctgcaggttcacagcctgtgactgggccagagattacggggagcgagtcgatgacgtcagcgtttgaactccatggcg

SEQ ID NO: 884 - DNA, 251 bp, Chinchilla lanigera
tgagcttccctccaccctatgaaagccgaaggtttggagcgaaacttataagaagcccaaatctcactatatttttaggtcatggcgacttcccacaagccacagcgatatgtagatatcgcgaggagcccctcccagttctggtccttccgcgtctcactaaagcgcatgcgctgcaggttcgcggcctgcgactgggcctgcaattcctgggagcgagttgatgacgtcagcgtttgaactccatggcg

SEQ ID NO: 885 - DNA, 260 bp, Heterocephalus glaber
tgagcttccctccgccccataagagaaagttgttgaagcagaagttataaggttcccacagctcagcatatcttatggtcatggtcacttcccagaagacatagcgatatgtagatatggtgagaagcacctcccaattatggcccagtcggctccttgctaaggcgcacgcgtactagcgtactatgggttccccgcctgtgactgagcccgcgattcctggagcgagttgatgacatcagcgtttgaactccatggcg

SEQ ID NO: 886 - DNA, 260 bp, Heterocephalus glaber; identical to SEQ ID NO: 885

SEQ ID NO: 887 - DNA, 260 bp, Heterocephalus glaber
tgagcttccctccgccccataagagaaagttgttgaagcagaaattataaggttcccacagctcagcatatcttatggtcatggtcacttcccagaagacatagcgatatgtagatatggtgagaagcacctcccaattctggcccagtcggctccttgctaaggcgcacgcgtactagcgtactatgggttccccgcctgtgactgagcccgcgattcctggagcgagttgatgacatcagcgtttgaactccatggcg

SEQ ID NO: 888 - DNA, 252 bp, Fukomys damarensis
tgagcttccctccgccccatggcaagggatgattgaaataggccttataagaggcccagatcttagtatattttttgatcatggtgacttcccacaacacacagcgatatgcagataggctggggagcacctcccaattccggcccagtcggttcttggctggggcgcacgcgccctgcgggttcccggcctgtgattgagcccgcgattcttggagcgagttgatgacgtcagcgtttgaactccatggcg

SEQ ID NO: 889 - DNA, 252 bp, Fukomys damarensis; identical to SEQ ID NO: 888

SEQ ID NO: 890 - DNA, 230 bp, Hystrix cristata
tgagcttccctccgccctatgagaacggcttgctggaagcacaacttataaaactccaaaacctctacacattttttgatcatgatgacttcccacaatgcgctgcgatatgcagatatcacggggagcaccgcccagttctggtccctgtggcgcatgcgcactgcaggttcccgagcccgcgagtccccggagcgagttgatgacgtcagcctctgagctccatggcg

SEQ ID NO: 891 - DNA, 239 bp, Myocastor coypus
tgagcttccctccaccctacaacgcagctaggtccacacggggactataagaggaccaaatctcaaaatgcttcttggtcagggtgacttcccagaatacacagcgatatgtagatttcctcccctactgagactttggctcctcactagggcgcatgcgctacaggtccccggcctatgactggaccagcgatttccccggagcgaattgatgacgtcagcatttgaactccatggcg

SEQ ID NO: 892 - DNA, 248 bp, Thryonomys swinderianus
tgagcttccctctgcctcagaagtaagagctttctgagccaaagcttataaagagccaaaactcaggctatattttggtcatggtgacttcccataatacgcagcgatatgtagatacagcggggagcacctcccagttctggcccagtcgggtcctctctggggcgcacgcgcgctgcagttcccgccctgtgactgagcccgcgattcctgggagcgaattgacgtcaccgtttcaactcatggcg

SEQ ID NO: 893 - DNA, 256 bp, Petromus typicus
tgagcttccctccgcctcataagggaaagcttgtgaaccggagcttataaagatcccaaaatccacgctatatcttggttatggtgatttccaacaatacacagcgatatgtagatatagtgggaagcacctcccagttctggcccaatcgagtcctctctagggcgcaagcgcgctgtgggttcccggcctgtgcgagtgcctgagcccgcgattcctgggagcgagttgacgtcaccgtttgaacttcatggcg

SEQ ID NO: 894 - DNA, 253 bp, Ctenodactylus gundi
tgagcttccctccgccctatggagggaaaattgcggaggcagcgtttataaagctaccgaagccagcgatgccttaaagtcatggtgatttcccacaatacacagcaatatgcaaacagatggggggagtttcccggccctgatccaatcgtcttattgcctgggcgcacgcgccctgcgcgttcccagccaatgacggagcccgcgactggtagcggggagttgatgacgtcggagttcgaacgctatggcg

SEQ ID NO: 895 - DNA, 240 bp, Castor canadensis
tgagcttccctccgccctatgggggaaagtgggctggagcagggtttataaagctcccaagccttaagacattttttaatcacggtgatttcccacaacacatagcgtcatgcaaatataatggagtgtggggccctgcgcctttcgcaccagagcgcacgcgcgcgtcttcaggcctgtgacaacgagcggtagatcgcctggtgcaggttgatgacgtcagcgcttgaactccatggc

SEQ ID NO: 896 - DNA, 240 bp, Castor canadensis; identical to SEQ ID NO: 895

SEQ ID NO: 897 - DNA, 240 bp, Castor canadensis; identical to SEQ ID NO: 895

SEQ ID NO: 898 - DNA, 240 bp, Castor canadensis; identical to SEQ ID NO: 895

SEQ ID NO: 899 - DNA, 236 bp, Oryctolagus cuniculus; identical to SEQ ID NO: 703

SEQ ID NO: 900 - DNA, 256 bp, Dipodomys stephensi
tgagcttcccaccgccctacaggaaaggttgtgctgaggcagactttataagactcccgcgcagaaagaaactttatagttatggtgatttcccacaagccactgcgtcatgcaaataaagcagggttgactgcttccaagtatggaccttaaggttttctctaggccgcgtacgctctgcgtattcagccacgtgaccctgagccagtggttgttgggagcacgttgtggacctctgcgtttggattccatggcg

SEQ ID NO: 901 - DNA, 257 bp, Dipodomys ordii
tgagcttcccaccgccctacaggaaagacttcgctgaggcagactttataaggctcccgcgcagaaagaaactttatagttatggtgatttcccacaagccactgcgtcatgcaaataaagcagggttgacggcttccaagtatgtaccttaaggtttttttctaggccgcgtacgctctgcgtattcagccacgtgaccctgagccagtggttgttgggagcacgttgtggacctctgcgtttggattccatggcg

SEQ ID NO: 902 - DNA, 245 bp, Perognathus longimembris
tgagcttccctccgccttacaaagcggagagggcggcgcgcaaactttataagcctctgaaatgggaagttactttacagtcatggtgacttcccacaaggcactgcgtcatgcaaatattgcagggttggcggctttctttcgagctctccccaggccttgacgctgtgcatacgcacccacgtgaccctaagccaatggttgtcgggagcatgttgatacgtccgcgtttggattccatggcg

SEQ ID NO: 903 - DNA, 209 bp, Nannospalax galili
tgagcttccctccgcccagctgggcgtgtggctggccgcacttataaagcctccgaacggtcggcatttcacagtgatggtgacttcccacaagacacagcgctatgcaaatgtggcggcggcggcggttcgccagggcgcacgcgtgctgcgagttcccgccagccgaggccccgcgctgggtgacgtcacgctcgagcgcgatggcg

SEQ ID NO: 904 - DNA, 302 bp, Artificial Sequence
  Description of Artificial Sequence: Synthetic polynucleotide
  modified_base (150)..(150): a, c, t, or g
  modified_base (236)..(236): a, c, t, or g
  modified_base (266)..(266): a, c, t, or g
tgagcttccyycssccmyhtrrrrvrdrbdsrbywscmrgcvrvmhytataagrctcsmawrymkvmrkrhatttywayrvtyayggtgryttcccacaavrcacagcgmkacggtgywratwtrsmwgrghgyryckyscccmsbksbngbccdsycvksatttgcatgtbtyytmdcytvrggctkcmygckcrctagcgcgcatactgcrkgkysmsrgmcwrkgacagtgmnwragccygcgmwtcccgscysggmrmkrgntgatgacgtcatccccrkcsyyyrarckcsatggcg

SEQ ID NO: 905 - DNA, 302 bp, Artificial Sequence
  Description of Artificial Sequence: Synthetic polynucleotide
  modified_base (31)..(31): a, c, t, or g
  modified_base (101)..(101): a, c, t, or g
  modified_base (150)..(150): a, c, t, or g
  modified_base (155)..(155): a, c, t, or g
  modified_base (196)..(196): a, c, t, or g
  modified_base (236)..(236): a, c, t, or g
  modified_base (266)..(266): a, c, t, or g
tgagcttccyycssccvyhtrvrrvvddbdndbyhvcvrssvrvvhytataagrstcsvrdrbvkvmrbvhayttywayrvtyabggtrrytwcccacaanrcayagcgmbvcggwsywdatwtvsmdrrshsyryykyvycchvbkvbngbccnbbyvkbatttgcatgtbyybthdyytvvrsctkcmbgykcncwmgcgcgcayrctgyrkrkhsmsrrmmdrkgacagtgmnhrrscchgcgmwtyccgsyysggmrvdrrntgatgacgtcatccccrkssyyyrarmkcsatggcg

SEQ ID NO: 906 - DNA, 302 bp, Artificial Sequence
  Description of Artificial Sequence: Synthetic polynucleotide
  modified_base (25)..(25): a, c, t, or g
  modified_base (27)..(27): a, c, t, or g
  modified_base (29)..(29): a, c, t, or g
  modified_base (31)..(31): a, c, t, or g
  modified_base (71)..(71): a, c, t, or g
  modified_base (81)..(81): a, c, t, or g
  modified_base (101)..(101): a, c, t, or g
  modified_base (133)..(133): a, c, t, or g
  modified_base (149)..(151): a, c, t, or g
  modified_base (155)..(155): a, c, t, or g
  modified_base (178)..(178): a, c, t, or g
  modified_base (182)..(183): a, c, t, or g
  modified_base (185)..(185): a, c, t, or g
  modified_base (196)..(196): a, c, t, or g
  modified_base (225)..(225): a, c, t, or g
  modified_base (236)..(236): a, c, t, or g
  modified_base (266)..(266): a, c, t, or g
tgagcttccyycssccvyhydvrrnvndndndbyhvcvrssvrvvhytataagrbkcvvrdrbvbvvvbvnmyythwayrntyabggtrrytwcccasaanrcayagcghbvcggwsywdatwtvvhdrrshnyryybyvbcchvbbvnnnbccnbbbvdbatttgcatgtbybbthnbytnnrnctbcmbrykmncwmgcgcgcayrcyryrbrkhsvbrrmmnrksacagtgmnhrrscshgmgmwbyccgsyysgghdvdrrntgrtgacrtcatccccrkbsyyyrrvmkcsatggcg

SEQ ID NO: 907 - DNA, 302 bp, Artificial Sequence
  Description of Artificial Sequence: Synthetic polynucleotide
  modified_base (19)..(19): a, c, t, or g
  modified_base (22)..(22): a, c, t, or g
  modified_base (25)..(33): a, c, t, or g
  modified_base (35)..(35): a, c, t, or g
  modified_base (38)..(38): a, c, t, or g
  modified_base (41)..(41): a, c, t, or g
  modified_base (46)..(46): a, c, t, or g
  modified_base (55)..(55): a, c, t, or g
  modified_base (61)..(61): a, c, t, or g
  modified_base (65)..(66): a, c, t, or g
  modified_base (71)..(71): a, c, t, or g
  modified_base (81)..(81): a, c, t, or g
  modified_base (101)..(101): a, c, t, or g
  modified_base (111)..(111): a, c, t, or g
  modified_base (120)..(120): a, c, t, or g
  modified_base (125)..(125): a, c, t, or g
  modified_base (133)..(133): a, c, t, or g
  modified_base (135)..(135): a, c, t, or g
  modified_base (140)..(141): a, c, t, or g
  modified_base (144)..(144): a, c, t, or g
  modified_base (146)..(146): a, c, t, or g
  modified_base (148)..(153): a, c, t, or g
  modified_base (155)..(157): a, c, t, or g
  modified_base (159)..(159): a, c, t, or g
  modified_base (175)..(175): a, c, t, or g
  modified_base (178)..(178): a, c, t, or g
  modified_base (182)..(183): a, c, t, or g
  modified_base (185)..(185): a, c, t, or g
  modified_base (191)..(191): a, c, t, or g
  modified_base (196)..(196): a, c, t, or g
  modified_base (217)..(217): a, c, t, or g
  modified_base (225)..(225): a, c, t, or g
  modified_base (236)..(236): a, c, t, or g
  modified_base (243)..(243): a, c, t, or g
  modified_base (263)..(263): a, c, t, or g
  modified_base (266)..(266): a, c, t, or g
tgagcttccyycsvccvynhdnvvnnnnnnnnnbnvcndvnvrvvnywawaarvnkyvvrnrbvnnvvbvnmybthwahrntbrbggtrrytwcccasranrcrywgcghnvcgghsywnatwknvhdrrvhnbnbbbynnccnvnbnnnnnncnnnbndbatttgcatgtbbbnkhnbbtnnvnctbyhnrybmncwmgcgcgcayrcyryrbvknbvbvvmvnrdsmsagtgmnhrrbcsnkhrvdbyccgsyybgshdvnddntgrtgacrtcatccccrkbvyyyvrvhkcbatggcg

SEQ ID NO: 908 - DNA, 302 bp, Artificial Sequence
  Description of Artificial Sequence: Synthetic polynucleotide
  modified_base (13)..(13): a, c, t, or g
  modified_base (17)..(17): a, c, t, or g
  modified_base (19)..(22): a, c, t, or g
  modified_base (25)..(33): a, c, t, or g
  modified_base (35)..(36): a, c, t, or g
  modified_base (38)..(39): a, c, t, or g
  modified_base (41)..(42): a, c, t, or g
  modified_base (45)..(46): a, c, t, or g
  modified_base (55)..(55): a, c, t, or g
  modified_base (58)..(58): a, c, t, or g
  modified_base (61)..(61): a, c, t, or g
  modified_base (63)..(67): a, c, t, or g
  modified_base (69)..(71): a, c, t, or g
  modified_base (74)..(74): a, c, t, or g
  modified_base (77)..(77): a, c, t, or g
  modified_base (81)..(81): a, c, t, or g
  modified_base (101)..(101): a, c, t, or g
  modified_base (111)..(111): a, c, t, or g
  modified_base (120)..(120): a, c, t, or g
  modified_base (123)..(123): a, c, t, or g
  modified_base (125)..(126): a, c, t, or g
  modified_base (128)..(128): a, c, t, or g
  modified_base (130)..(130): a, c, t, or g
  modified_base (132)..(136): a, c, t, or g
  modified_base (139)..(141): a, c, t, or g
  modified_base (144)..(153): a, c, t, or g
  modified_base (155)..(161): a, c, t, or g
  modified_base (175)..(175): a, c, t, or g
  modified_base (177)..(178): a, c, t, or g
  modified_base (182)..(185): a, c, t, or g
  modified_base (190)..(191): a, c, t, or g
  modified_base (196)..(196): a, c, t, or g
  modified_base (212)..(212): a, c, t, or g
  modified_base (214)..(214): a, c, t, or g
  modified_base (217)..(218): a, c, t, or g
  modified_base (221)..(221): a, c, t, or g
  modified_base (225)..(225): a, c, t, or g
  modified_base (227)..(227): a, c, t, or g
  modified_base (236)..(240): a, c, t, or g
  modified_base (243)..(243): a, c, t, or g
  modified_base (245)..(245): a, c, t, or g
  modified_base (247)..(248): a, c, t, or g
  modified_base (255)..(255): a, c, t, or g
  modified_base (260)..(260): a, c, t, or g
  modified_base (262)..(264): a, c, t, or g
  modified_base (266)..(266): a, c, t, or g
  modified_base (285)..(286): a, c, t, or g
tgagcttccyhcnvccnbnnnnvvnnnnnnnnnbnncnnvnnvvnnhwwwaarvnbhnvrnvnnnnnvnnnvbnyhnahrntbrbggyvrytwcccabranvcrydrcghnvcgghsyhnatndnnhnrnvnnnnnbbnnnccnnnnnnnnnnhnnnnnnnatttgcatgtbbbnbnnbbtnnnnctbynndybhnswmgcgcgcayrcbrndnvbnnvbnvvvnvnvvsagtgmnnnnnbsndndnnbyccgvnbbgvndnnndnygdbgacvtcatccccdbnnhbhvrvhkybatggcg

SEQ ID NO: 909 - DNA, 302 bp, Artificial Sequence
  Description of Artificial Sequence: Synthetic polynucleotide
  modified_base (13)..(13): a, c, t, or g
  modified_base (17)..(22): a, c, t, or g
  modified_base (24)..(33): a, c, t, or g
  modified_base (35)..(36): a, c, t, or g
  modified_base (38)..(39): a, c, t, or g
  modified_base (41)..(42): a, c, t, or g
  modified_base (44)..(46): a, c, t, or g
  modified_base (55)..(58): a, c, t, or g
  modified_base (61)..(61): a, c, t, or g
  modified_base (63)..(71): a, c, t, or g
  modified_base (74)..(74): a, c, t, or g
  modified_base (77)..(77): a, c, t, or g
  modified_base (79)..(79): a, c, t, or g
  modified_base (81)..(81): a, c, t, or g
  modified_base (101)..(101): a, c, t, or g
  modified_base (110)..(111): a, c, t, or g
  modified_base (120)..(120): a, c, t, or g
  modified_base (123)..(128): a, c, t, or g
  modified_base (130)..(130): a, c, t, or g
  modified_base (132)..(136): a, c, t, or g
  modified_base (139)..(141): a, c, t, or g
  modified_base (144)..(153): a, c, t, or g
  modified_base (155)..(161): a, c, t, or g
  modified_base (175)..(175): a, c, t, or g
  modified_base (177)..(178): a, c, t, or g
  modified_base (182)..(185): a, c, t, or g
  modified_base (190)..(191): a, c, t, or g
  modified_base (194)..(194): a, c, t, or g
  modified_base (196)..(196): a, c, t, or g
  modified_base (212)..(212): a, c, t, or g
  modified_base (214)..(214): a, c, t, or g
  modified_base (217)..(218): a, c, t, or g
  modified_base (221)..(221): a, c, t, or g
  modified_base (225)..(227): a, c, t, or g
  modified_base (236)..(240): a, c, t, or g
  modified_base (243)..(245): a, c, t, or g
  modified_base (247)..(248): a, c, t, or g
  modified_base (255)..(255): a, c, t, or g
  modified_base (257)..(257): a, c, t, or g
  modified_base (259)..(260): a, c, t, or g
  modified_base (262)..(266): a, c, t, or g
  modified_base (283)..(283): a, c, t, or g
  modified_base (285)..(286): a, c, t, or g
  modified_base (289)..(289): a, c, t, or g
  modified_base (292)..(293): a, c, t, or g
  modified_base (296)..(296): a, c, t, or g
tgagcttccyhcnvccnnnnnnvnnnnnnnnnnbnncnnvnnvnnnhwwwarrvnnnnvvnvnnnnnnnnnvbnyhnanvnwbrbgryvdykdccmrbranvydhdrcrnnvcgghsyhnmynnnnnndnvnnnnnbbnnnccnnnnnnnnnnhnnnnnnnatttgcatgtbbbnbnnbbtnnnnctbhnndhnhnswmgcgcgcayrcbrndnvbnnvbnvvvnnnvvsagtgmnnnnnbbnnndnnbyccgvnbnsnndnnnnnbrdbgacvycatcccynbnnhbnvdnndbnatggcg

SEQ ID NO: 910 - DNA, 240 bp, Choloepus hoffmanni
tgagcttccctccgccctatagaaaaaaacatagtttatgctggatttataagattcccaaatctaaagccatttcacagttacggtgaacttcccactacacacggcgatatgcaaatatagcggaagtgttcctgaggcgtggtaaagcgcgcgcgcgctgagagttcccgccctgtggtgctgggctggagatgcctgagaactggctgatgacggcaacgttcgggctccatggcg

SEQ ID NO: 911 - DNA, 239 bp, Choloepus didactylus
tgagcttccctccgcccgataggaaaaatcgtgcctatgctggatttataagattcccacatctaaagccatttctcagttacggtgaacttcccactacacacggcgatatgcaaatatagcggaagtgttcctgaggcgtggtaaagcgcgcgcgcgctgagagttcccgccctgtggtgctgggctggagatgcctgagaactggctgatgacggcaacgttcgggctccatggcg

SEQ ID NO: 912 - DNA, 239 bp, Choloepus didactylus
tgagcttccctccgcccgatagaaaaaatcgtgcctacgctggatttataagattcccacatctaaagccatttctcagttacggtgaacttcccactacacacggcgatatgcaaatatagcggaagtgttcctgaggcgtggtaaagcgcgcgcgcgctgagagttcccgccctgtggtgctgggctggagatgcctgagaagtggctgatgacggcaacgttcgggctccatggcg

SEQ ID NO: 913 - DNA, 239 bp, Choloepus didactylus
tgagcttccctccgcccgatagaaaaaatagtgcctacgctggatttataagattcccacatctaaagccatttgtcagttacggtgaacttcccactacacacggcgatatgcaaatatagcggaagtgttcctgaggcgtggtaaagcgcgcgcgcgctgagagttcccgccctgtggtgctgggctggagatgcctgagaactggctgatgacggcaacgttcgggctccatggcg

SEQ ID NO: 914 - DNA, 238 bp, Bradypus variegatus
tgagcttccctccgccccatgaaaaacctgctttgaaaacgggatttataagactcccacatcaaaagccatttgacagttacggtgacttcccacaagacacggcgatatgcaaatatagcggaagtgttcctgaggcttggtaaagcgcacgcgcgctgggagttcccgccgtgtggtgctggtccctagatgcctgagagcgggctgatgacggcagcgtttgggctccatggcg

SEQ ID NO: 915 - DNA, 238 bp, Tamandua tetradactyla
tgagcttccctccgccctgtaaagagaagagggtgtttgccggatttataagattcccactgctaaagacatttcacagttatggtgacttcccacaacacttggcgatatgcaaatatcacggagttggccctgaggcgcggcgagacgcacgcgcgctgagagttcccgcctgctcaccctgggtccaaggttcctgaaggcgggttgaagactgcagtgtttgggtgccatggcg

SEQ ID NO: 916 - DNA, 238 bp, Myrmecophaga tridactyla
tgagcttccctccgccctacggggtaagagaggtgtttgcgggatttataagattcccattgctatagacatttcacagttatggtgacttcccacaacacctggcgatatgcaaatatcacggagttggccctgaggcgcggcgagacgcaggcgcgctgagagttcccgccttctcaccctgggtccaaggttcctggaggcgggttgaagactgcagtgtttgggcgccatggcg

SEQ ID NO: 917 - DNA, 237 bp, Tolypeutes matacus
tgagcttccctccgccctataggaagcgcgcactttaggcaggatttataagacacccatatctaaggacatttcacgattatggtgacttcccacaacacatagcgaaatgcaaatatgtggagcaggcgctgaggcgtggtcgggcgcacgcgcgctgctagttcccgcccttcggcgataggcccgagatgcctgagagctggttgatcacgcctgcgtttggactcaatggcg

SEQ ID NO: 918 - DNA, 237 bp, Chaetophractus vellerosus
tgagcttccctccgccctgtaagaaacccgcattttaggcaggatttataagacacccatagctaaagccatttcacggttatggtgacttcccagaatacatagcgaaatgcaaatatgtggagcaggcacggaggcgtggtcgggagcgcgcgcgctgcgagttcccgcccttcggcgctaggcctgagatgcctgagagcgggttgatcaggtctacgtttgtactcaatggcg

SEQ ID NO: 919 - DNA, 236 bp, Dasypus novemcinctus
tgagcttccctccgccctataaagcgatagttttttaaactggacttataaggcacccatatctacgtatatttcatggttagggtgatttcccacaacacatagcgaaatgcaaatatgtggagcgggcgctgaggcgtggtcgggcgcaagcgcgctgcgacttcccgcctttcggccctaggccccagattcctgggagctggatgatgacgttgacgttcggataccatggc

SEQ ID NO: 920 - DNA, 239 bp, Artificial Sequence
  Description of Artificial Sequence: Synthetic polynucleotide
  modified_base (38)..(38): a, c, t, or g
  modified_base (88)..(88): a, c, t, or g
  modified_base (121)..(121): a, c, t, or g
tgagcttccctccgccckatarrrarmvhsvdkybtangcdggatttataagaywcccayakctaaagmcatttcwcrgttayggtgnacttcccacwacacayrgcgawatgcaaatatngyggarswgkysctgaggcgtggtmrrgcgcrcgcgcgctgmgagttcccgccytkyggysctrggcysragatkcctgagarckggytgatgacgkcwrcgttyggrckccatggcg

SEQ ID NO: 921 - DNA, 239 bp, Artificial Sequence
  Description of Artificial Sequence: Synthetic polynucleotide
  modified_base (38)..(38): a, c, t, or g
  modified_base (88)..(88): a, c, t, or g
  modified_base (121)..(121): a, c, t, or g
  modified_base (191)..(191): a, c, t, or g
tgagcttccctccgccckrtrrrrhrmvhvvdkybtwnrcdggatttataagaywcccaywkctahrgmcatttswcrgttayggtgnacttcccacwabachyrgcgawatgcaaatatnryggarbwgkysctgaggcgyggyvrrrcgcrvgcgcgctgmgagttcccgccytbysrysctrggyysnagrtkcctgrrrrckggytgawsackkcwrygttyggrykcmatggcg

SEQ ID NO: 922 - DNA, 239 bp, Artificial Sequence; identical to SEQ ID NO: 921
  Description of Artificial Sequence: Synthetic polynucleotide
  modified_base (38)..(38): a, c, t, or g
  modified_base (88)..(88): a, c, t, or g
  modified_base (121)..(121): a, c, t, or g
  modified_base (191)..(191): a, c, t, or g

SEQ ID NO: 923 - DNA, 240 bp, Artificial Sequence
  Description of Artificial Sequence: Synthetic polynucleotide
  modified_base (28)..(29): a, c, t, or g
  modified_base (31)..(31): a, c, t, or g
  modified_base (33)..(33): a, c, t, or g
  modified_base (39)..(39): a, c, t, or g
  modified_base (42)..(42): a, c, t, or g
  modified_base (89)..(89): a, c, t, or g
  modified_base (122)..(122): a, c, t, or g
  modified_base (192)..(192): a, c, t, or g
tgagcttccctccgcccbryrrrrhrmnnvndnbybwwnrcnggayttataagrywcccahwkcwahrkmyatttswyrrttabggtgnayttcccaswabachyrgcgawatgcaaatatnryggarbdgkyvckgaggckyggyvrrrmgcrvgcgcgctgvkasttcccgccbkbysrysmtrgkyybnagrtkcctgrrrrskgghtgawsaskbydrygttygkrydcmatggcg

SEQ ID NO: 924 - DNA, 240 bp, Artificial Sequence; identical to SEQ ID NO: 923
  Description of Artificial Sequence: Synthetic polynucleotide
  modified_base (28)..(29): a, c, t, or g
  modified_base (31)..(31): a, c, t, or g
  modified_base (33)..(33): a, c, t, or g
  modified_base (39)..(39): a, c, t, or g
  modified_base (42)..(42): a, c, t, or g
  modified_base (89)..(89): a, c, t, or g
  modified_base (122)..(122): a, c, t, or g
  modified_base (192)..(192): a, c, t, or g

SEQ ID NO: 925 - DNA, 240 bp, Artificial Sequence; identical to SEQ ID NO: 923
  Description of Artificial Sequence: Synthetic polynucleotide
  modified_base (28)..(29): a, c, t, or g
  modified_base (31)..(31): a, c, t, or g
  modified_base (33)..(33): a, c, t, or g
  modified_base (39)..(39): a, c, t, or g
  modified_base (42)..(42): a, c, t, or g
  modified_base (89)..(89): a, c, t, or g
  modified_base (122)..(122): a, c, t, or g
  modified_base (192)..(192): a, c, t, or g

SEQ ID NO: 926 - protein, 1429 aa, Artificial Sequence
  Description of Artificial Sequence: Synthetic polypeptide
MQRSPLEKASVVSKLFFSWTRPILRKGYRQRLELSDIYQIPSVDSADNLSEKLEREWDRELASKKNPKLINALRRCFFWRFMFYGIFLYLGEVTKAVQPLLLGRIIASYDPDNKEERSIAIYLGIGLCLLFIVRTLLLHPAIFGLHHIGMQMRIAMFSLIYKKTLKLSSRVLDKISIGQLVSLLSNNLNKFDEGLALAHFVWIAPLQVALLMGLIWELLQASAFCGLGFLIVLALFQAGLGRMMMKYRDQRAGKISERLVITSEMIENIQSVKAYCWEEAMEKMIENLRQTELKLTRKAAYVRYFNSSAFFFSGFFVVFLSVLPYALIKGIILRKIFTTISFCIVLRMAVTRQFPWAVQTWYDSLGAINKIQDFLQKQEYKTLEYNLTTTEVVMENVTAFWEEGFGELFEKAKQNNNNRKTSNGDDSLFFSNFSLLGTPVLKDINFKIERGQLLAVAGSTGAGKTSLLMVIMGELEPSEGKIKHSGRISFCSQFSWIMPGTIKENIIFGVSYDEYRYRSVIKACQLEEDISKFAEKDNIVLGEGGITLSGGQRARISLARAVYKDADLYLLDSPFGYLDVLTEKEIFESCVCKLMANKTRILVTSKMEHLKKADKILILHEGSSYFYGTFSELQNLQPDFSSKLMGCDSFDQFSAERRNSILTETLHRFSLEGDAPVSWTETKKQSFKQTGEFGEKRKNSILNPINSITLQARRRQSVLNLMTHSVNQGQNIHRKTTASTRKVSLAPQANLTELDIYSRRLSQETGLEISEEINEEDLKECFFDDMESIPAVTTWNTYLRYITVHKSLIFVLIWCLVIFLAEVAASLVVLWLLGNTPLQDKGNSTHSRNNSYAVIITSTSSYYVFYIYVGVADTLLAMGFFRGLPLVHTLITVSKILHHKMLHSVLQAPMSTLNTLKAGGILNRFSKDIAILDDLLPLTIFDFIQLLLIVIGAIAVVAVLQPYIFVATVPVIVAFIMLRAYFLQTSQQLKQLESEGRSPIFTHLVTSLKGLWTLRAFGRQPYFETLFHKALNLHTANWFLYLSTLRWFQMRIEMIFVIFFIAVTFISILTTGEGEGRVGIILTLAMNIMSTLQWAVNSSIDVDSLMRSVSRVFKFIDMPTEGKPTKSTKPYKNGQLSKVMIIENSHVKKDDIWPSGGQMTVKDLTAKYTEGGNAILENISFSISPGQRVGLLGRTGSGKSTLLSAFLRLLNTEGEIQIDGVSWDSITLQQWRKAFGVIPQKVFIFSGTFRKNLDPYEQWSDQEIWKVADEVGLRSVIEQFPGKLDFVLVDGGCVLSHGHKQLMCLARSVLSKAKILLLDEPSAHLDPVTYQIIRRTLKQAFADCTVILCEHRIEAMLECQQFLVIEENKVRQYDSIQKLLNERSLFRQAISPSDRVKLFPHRNSSKCKSKPQIAALKEETEEEVQDTRL

SEQ ID NO: 927 - protein, 1465 aa, Homo sapiens
MPEQERQITAREGASRKILSKLSLPTRAWEPAMKKSFAFDNVGYEGGLDGLGPSSQVATSTVRILGMTCQSCVKSIEDRISNLKGIISMKVSLEQGSATVKYVPSVVCLQQVCHQIGDMGFEASIAEGKAASWPSRSLPAQEAVVKLRVEGMTCQSCVSSIEGKVRKLQGVVRVKVSLSNQEAVITYQPYLIQPEDLRDHVNDMGFEAAIKSKVAPLSLGPIDIERLQSTNPKRPLSSANQNFNNSETLGHQGSHVVTLQLRIDGMHCKSCVLNIEENIGQLLGVQSIQVSLENKTAQVKYDPSCTSPVALQRAIEALPPGNFKVSLPDGAEGSGTDHRSSSSHSPGSPPRNQVQGTCSTTLIAIAGMTCASCVHSIEGMISQLEGVQQISVSLAEGTATVLYNPSVISPEELRAAIEDMGFEASVVSESCSTNPLGNHSAGNSMVQTTDGTPTSVQEVAPHTGRLPANHAPDILAKSPQSTRAVAPQKCFLQIKGMTCASCVSNIERNLQKEAGVLSVLVALMAGKAEIKYDPEVIQPLEIAQFIQDLGFEAAVMEDYAGSDGNIELTITGMTCASCVHNIESKLTRTNGITYASVALATSKALVKFDPEIIGPRDIIKIIEEIGFHASLAQRNPNAHHLDHKMEIKQWKKSFLCSLVFGIPVMALMIYMLIPSNEPHQSMVLDHNIIPGLSILNLIFFILCTFVQLLGGWYFYVQAYKSLRHRSANMDVLIVLATSIAYVYSLVILVVAVAEKAERSPVTFFDTPPMLFVFIALGRWLEHLAKSKTSEALAKLMSLQATEATVVTLGEDNLIIREEQVPMELVQRGDIVKVVPGGKFPVDGKVLEGNTMADESLITGEAMPVTKKPGSTVIAGSINAHGSVLIKATHVGNDTTLAQIVKLVEEAQMSKAPIQQLADRFSGYFVPFIIIMSTLTLVVWIVIGFIDFGVVQRYFPNPNKHISQTEVIIRFAFQTSITVLCIACPCSLGLATPTAVMVGTGVAAQNGILIKGGKPLEMAHKIKTVMFDKTGTITHGVPRVMRVLLLGDVATLPLRKVLAVVGTAEASSEHPLGVAVTKYCKEELGTETLGYCTDFQAVPGCGIGCKVSNVEGILAHSERPLSAPASHLNEAGSLPAEKDAVPQTFSVLIGNREWLRRNGLTISSDVSDAMTDHEMKGQTAILVAIDGVLCGMIAIADAVKQEAALAVHTLQSMGVDVVLITGDNRKTARAIATQVGINKVFAEVLPSHKVAKVQELQNKGKKVAMVGDGVNDSPALAQADMGVAIGTGTDVAIEAADVVLIRNDLLDVVASIHLSKRTVRRIRINLVLALIYNLVGIPIAAGVFMPIGIVLQPWMGSAAMAASSVSVVLSSLQLKCYKKPDLERYEAQAHGHMKPLTASQVSVHIGMDDRWRDSPRATPWDQVSYVSQVSLSSLTSDKPSRHSAAADDDGDKWSLLLNGRDEEQYI

SEQ ID NO: 928 - protein, 1500 aa, Homo sapiens
MDPSMGVNSVTISVEGMTCNSCVWTIEQQIGKVNGVHHIKVSLEEKNATIIYDPKLQTPKTLQEAIDDMGFDAVIHNPDPLPVLTDTLFLTVTASLTLPWDHIQSTLLKTKGVTDIKIYPQKRTVAVTIIPSIVNANQIKELVPELSLDTGTLEKKSGACEDHSMAQAGEVVLKMKVEGMTCHSCTSTIEGKIGKLQGVQRIKVSLDNQEATIVYQPHLISVEEMKKQIEAMGFPAFVKKQPKYLKLGAIDVERLKNTPVKSSEGSQQRSPSYTNDSTATFIIDGMHCKSCVSNIESTLSALQYVSSIVVSLENRSAIVKYNASSVTPESLRKAIEAVSPGLYRVSITSEVESTSNSPSSSSLQKIPLNVVSQPLTQETVINIDGMTCNSCVQSIEGVISKKPGVKSIRVSLANSNGTVEYDPLLTSPETLRGAIEDMGFDATLSDTNEPLVVIAQPSSEMPLLTSTNEFYTKGMTPVQDKEEGKNSSKCYIQVTGMTCASCVANIERNLRREEGIYSILVALMAGKAEVRYNPAVIQPPMIAEFIRELGFGATVIENADEGDGVLELVVRGMTCASCVHKIESSLTKHRGILYCSVALATNKAHIKYDPEIIGPRDIIHTIESLGFEASLVKKDRSASHLDHKREIRQWRRSFLVSLFFCIPVMGLMIYMMVMDHHFATLHHNQNMSKEEMINLHSSMFLERQILPGLSVMNLLSFLLCVPVQFFGGWYFYIQAYKALKHKTANMDVLIVLATTIAFAYSLIILLVAMYERAKVNPITFFDTPPMLFVFIALGRWLEHIAKGKTSEALAKLISLQATEATIVTLDSDNILLSEEQVDVELVQRGDIIKVVPGGKFPVDGRVIEGHSMVDESLITGEAMPVAKKPGSTVIAGSINQNGSLLICATHVGADTTLSQIVKLVEEAQTSKAPIQQFADKLSGYFVPFIVFVSIATLLVWIVIGFLNFEIVETYFPGYNRSISRTETIIRFAFQASITVLCIACPCSLGLATPTAVMVGTGVGAQNGILIKGGEPLEMAHKVKVVVFDKTGTITHGTPVVNQVKVLTESNRISHHKILAIVGTAESNSEHPLGTAITKYCKQELDTETLGTCIDFQVVPGCGISCKVTNIEGLLHKNNWNIEDNNIKNASLVQIDASNEQSSTSSSMIIDAQISNALNAQQYKVLIGNREWMIRNGLVINNDVNDFMTEHERKGRTAVLVAVDDELCGLIAIADTVKPEAELAIHILKSMGLEVVLMTGDNSKTARSIASQVGITKVFAEVLPSHKVAKVKQLQEEGKRVAMVGDGINDSPALAMANVGIAIGTGTDVAIEAADVVLIRNDLLDVVASIDLSRKTVKRIRINFVFALIYNLVGIPIAAGVFMPIGLVLQPWMGSAAMAASSVSVVLSSLFLKLYRKPTYESYELPARSQIGQKSPSEISVHVGIDDTSRNSPKLGLLDRIVNYSRASINSLLSDKRSLNSVVTSEPDKHSLLVGDFREDDDTAL

SEQ ID NO: 929 - protein, 1532 aa, Homo sapiens
MGHSKQIRILLLNEMEKLEKTLFRLEQGYELQFRLGPTLQGKAVTVYTNYPFPGETFNREKFRSLDWENPTEREDDSDKYCKLNLQQSGSFQYYFLQGNEKSGGGYIVVDPILRVGADNHVLPLDCVTLQTFLAKCLGPFDEWESRLRVAKESGYNMIHFTPLQTLGLSRSCYSLANQLELNPDFSRPNRKYTWNDVGQLVEKLKKEWNVICITDVVYNHTAANSKWIQEHPECAYNLVNSPHLKPAWVLDRALWRFSCDVAEGKYKEKGIPALIENDHHMNSIRKIIWEDIFPKLKLWEFFQVDVNKAVEQFRRLLTQENRRVTKSDPNQHLTIIQDPEYRRFGCTVDMNIALTTFIPHDKGPAAIEECCNWFHKRMEELNSEKHRLINYHQEQAVNCLLGNVFYERLAGHGPKLGPVTRKHPLVTRYFTFPFEEIDFSMEESMIHLPNKACFLMAHNGWVMGDDPLRNFAEPGSEVYLRRELICWGDSVKLRYGNKPEDCPYLWAHMKKYTEITATYFQGVRLDNCHSTPLHVAEYMLDAARNLQPNLYVVAELFTGSEDLDNVFVTRLGISSLIREAMSAYNSHEEGRLVYRYGGEPVGSFVQPCLRPLMPAIAHALFMDITHDNECPIVHRSAYDALPSTTIVSMACCASGSTRGYDELVPHQISVVSEERFYTKWNPEALPSNTGEVNFQSGIIAARCAISKLHQELGAKGFIQVYVDQVDEDIVAVTRHSPSIHQSVVAVSRTAFRNPKTSFYSKEVPQMCIPGKIEEVVLEARTIERNTKPYRKDENSINGTPDITVEIREHIQLNESKIVKQAGVATKGPNEYIQEIEFENLSPGSVIIFRVSLDPHAQVAVGILRNHLTQFSPHFKSGSLAVDNADPILKIPFASLASRLTLAELNQILYRCESEEKEDGGGCYDIPNWSALKYAGLQGLMSVLAEIRPKNDLGHPFCNNLRSGDWMIDYVSNRLISRSGTIAEVGKWLQAMFFYLKQIPRYLIPCYFDAILIGAYTTLLDTAWKQMSSFVQNGSTFVKHLSLGSVQLCGVGKFPSLPILSPALMDVPYRLNEITKEKEQCCVSLAAGLPHFSSGIFRCWGRDTFIALRGILLITGRYVEARNIILAFAGTLRHGLIPNLLGEGIYARYNCRDAVWWWLQCIQDYCKMVPNGLDILKCPVSRMYPTDDSAPLPAGTLDQPLFEVIQEAMQKHMQGIQFRERNAGPQIDRNMKDEGFNITAGVDEETGFVYGGNRFNCGTWMDKMGESDRARNRGIPATPRDGSAVEIVGLSKSAVRWLLELSKKNIFPYHEVTVKRHGKAIKVSYDEWNRKIQDNFEKLFHVSEDPSDLNEKHPNLVHKRGIYKDSYGASSPWCDYQLRPNFTIAMVVAPELFTTEKAWKALEIAEKKLLGPLGMKTLDPDDMVYCGIYDNALDNDNYNLAKGFNYHQGPEWLWPIGYFLRAKLYFSRLMGPETTAKTIVLVKNVLSRHYVHLERSPWKGLPELTNENAQYCPFSCETQAWSIATILETLYDL

SEQ ID NO: 930 - protein, 738 aa, Homo sapiens
MAEAHQAVAFQFTVTPDGVDFRLSREALKHVYLSGINSWKKRLIRIKNGILRGVYPGSPTSWLVVIMATVGSSFCNVDISLGLVSCIQRCLPQGCGPYQTPQTRALLSMAIFSTGVWVTGIFFFRQTLKLLLCYHGWMFEMHGKTSNLTRIWAYLESVRPLLDDEEYYRMELLAKEFQDKTAPRLQKYLVLKSWWASNYVSDWWEEYIYLRGRSPLMVNSNYYVMDLVLIKNTDVQAARLGNIIHAMIMYRRKLDREEIKPVMALGIVPMCSYQMERMFNTTRIPGKDTDVLQHLSDSRHVAVYHKGRFFKLWLYEGARLLKPQDLEMQFQRILDDPSPPQPGEEKLAALTAGGRVEWAQARQAFFSSGKNKAALEAIERAAFFVALDEESYSYDPEDEASLSLYGKALLHGNCYNRWFDKSFTLISFKNGQLGLNAEHAWADAPIIGHLWEFVLGTDSFHLGYTETGHCLGKPNPALAPPTRLQWDIPKQCQAVIESSYQVAKALADDVELYCFQFLPFGKGLIKKCRTSPDAFVQIALQLAHFRDRGKFCLTYEASMTRMFREGRTETVRSCTSESTAFVQAMMEGSHTKADLRDLFQKAAKKHQNMYRLAMTGAGIDRHLFCLYLVSKYLGVSSPFLAEVLSEPWRLSTSQIPQSQIRMFDPEQHPNHLGAGGGFGPVADDGYGVSYMIAGENTIFFHISSKFSSSETNAQRFGNHIRKALLDIADLFQVPKAYS

SEQ ID NO: 931 - protein, 772 aa, Homo sapiens
MAEAHQAVAFQFTVTPDGVDFRLSREALKHVYLSGINSWKKRLIRIKNGILRGVYPGSPTSWLVVIMATVGSSFCNVDISLGLVSCIQRCLPQGCGPYQTPQTRALLSMAIFSTGVWVTGIFFFRQTLKLLLCYHGWMFEMHGKTSNLTRIWAMCIRLLSSRHPMLYSFQTSLPKLPVPRVSATIQRYLESVRPLLDDEEYYRMELLAKEFQDKTAPRLQKYLVLKSWWASNYVSDWWEEYIYLRGRSPLMVNSNYYVMDLVLIKNTDVQAARLGNIIHAMIMYRRKLDREEIKPVMALGIVPMCSYQMERMFNTTRIPGKDTDVLQHLSDSRHVAVYHKGRFFKLWLYEGARLLKPQDLEMQFQRILDDPSPPQPGEEKLAALTAGGRVEWAQARQAFFSSGKNKAALEAIERAAFFVALDEESYSYDPEDEASLSLYGKALLHGNCYNRWFDKSFTLISFKNGQLGLNAEHAWADAPIIGHLWEFVLGTDSFHLGYTETGHCLGKPNPALAPPTRLQWDIPKQCQAVIESSYQVAKALADDVELYCFQFLPFGKGLIKKCRTSPDAFVQIALQLAHFRDRGKFCLTYEASMTRMFREGRTETVRSCTSESTAFVQAMMEGSHTKADLRDLFQKAAKKHQNMYRLAMTGAGIDRHLFCLYLVSKYLGVSSPFLAEVLSEPWRLSTSQIPQSQIRMFDPEQHPNHLGAGGGFGPVADDGYGVSYMIAGENTIFFHISSKFSSSETNAQRFGNHIRKALLDIADLFQVPKAYS

SEQ ID NO: 932 - protein, 772 aa, Homo sapiens; identical to SEQ ID NO: 931

SEQ ID NO: 933 - protein, 772 aa, Homo sapiens; identical to SEQ ID NO: 931

SEQ ID NO: 934 - protein, 772 aa, Homo sapiens; identical to SEQ ID NO: 931

SEQ ID NO: 935 - protein, 772 aa, Homo sapiens; identical to SEQ ID NO: 931

SEQ ID NO: 936 - DNA, 227 bp, Artificial Sequence
  Description of Artificial Sequence: Synthetic polynucleotide
tggcaaacaccgccggcgcaaacagcatttataatgcgctcatacctaaagccacttgtcggttacggtgacttcccaacaagacattgcgacatgcaaatactacagtgcgtcccgccccctggtgtagttccacgctgggacgcacacgcactacggttcccgcctttagacgactgcgctggcgattcctgggagaggactgatgacgtcagcgttcgggctcc

SEQ ID NO: 937 - DNA, 227 bp, Artificial Sequence
  Description of Artificial Sequence: Synthetic polynucleotide
tggcaaacactgccggctcaaacagcatttataatgcgctcatacctaaagccacttgtcggttacggtgacttcccaacaagacattgcgacatgcaaatactgcggtgcgtcccgccccctggtgtagttccacgctgggacgcacacgcactacggttcccgcctttagacgactgcgccggcgattcctgggagaggactgatgacgtcagcgttcgggctcc

SEQ ID NO: 938 - DNA, 227 bp, Artificial Sequence
  Description of Artificial Sequence: Synthetic polynucleotide
tggcaaacaacgccggcgcaaacagcatttataatgcgctcatacctaaagccacttgtcggttacggtgacttcccaacaagacattgcgacatgcaaatattacagtgcgtcccgccccctggtgtagttccacgctaggacgcacacgcactacggttcccgcctttagacgactgcgctggcgattcctgggagcggactgatgacgtcagcgttcgggctcc

SEQ ID NO: 939 - DNA, 233 bp, Artificial Sequence
  Description of Artificial Sequence: Synthetic polynucleotide
tggcaaaaactgacggctcaagcagcatttataaggctcccatacctaaagacatttgtcggttatggtgacttccccacaagacattgcgacatgcaaatactgcggagcgtaccccctccccctggcgcaactcctcgctgggacgcacgcgcgctacgtgttcccgcctttagtgacgtctgcgccggcgattcctgggagagggttgatgacgtcagcgttcgggctcc

SEQ ID NO: 940 - DNA, 245 bp, Artificial Sequence
  Description of Artificial Sequence: Synthetic polynucleotide
tgggaaaaagtggcggctcacgcagcatttataaggctcccatacctaaagacatttcacggttatggtgacttccccacaagacatagcgacatgcaaatattgcggagcgtacgcgcctccccctgtcctgtgcaggcatcttctcagccaggacgcacgcgcgctgcgtgttcccgccctgagtgacttctgcgccggcgatttcctgggaggagggttgatgacgtcaacgttcgggctcc

SEQ ID NO: 941 - DNA, 230 bp, Artificial Sequence
  Description of Artificial Sequence: Synthetic polynucleotide
tggcaaaaactgccggctcaagcagcatttataatgcgcccatacctaaagccacttgtcggttacggtgacttcccaacaagacattgcgacatgcaaatactgcggtgcgtccctccccctggcgtaactccacgctgggacgcacgcgcgctacgtgttcccgcctttactgacgtctgcgccggcgattcctgggagagggttgatgacgtcagcgttcgggctcc

SEQ ID NO: 942 - DNA, 243 bp, Artificial Sequence
  Description of Artificial Sequence: Synthetic polynucleotide
tgggaaaaagtggcggctcacgcagcatttataaggctcccatacctaaagacatttcacggttatggtgacttccccacaagacattgcgacatgcaaatattgcggagcgtacgccctccccctgtcctgtgcaggcatcttctcgccaggacgcacgcgcgctgcgtgttcccgccttgagtgacttctgcgccggcgatttcctgggaggagggttgatgacgtcaacgttcgggctcc

SEQ ID NO: 943 - DNA, 277 bp, Artificial Sequence
  Description of Artificial Sequence: Synthetic polynucleotide
tgggaaaaagtgggggctcacgcagcatttataaggctcccatacctaaagacatttcacggttatggtgacttcccccacaatacatagcgacatgcaaatatcatggtccttccgcggggcgtgcggcctccccctgtcccgtgccccgtaggcgtcttctcagccaggagacgcacgcggcgcgctgcgtgttcccgccctgagtgacttctgggccggcgatttccctgggaggagggttggatgacgtcagcatcgccaacgttcgggctcc

SEQ ID NO: 944 - DNA, 287 bp, Artificial Sequence
  Description of Artificial Sequence: Synthetic polynucleotide
tgggaaaaagtggggctcacgcagaatttataaggctcccatacctaaagacatttcacggttatggtgacttcccccacaatacatagcgacatgcaaatatcatggtccttccgcggggcgtgcggcctccccctgtcccgtaccccgcaggcgtcttctcagccaggaggcgcacgcggcgcgctgcgccctgttcccgccctgagtgactagggattctgggcccgcgatttcccgctgggaggcgggttggatgacgtcagcatcgccagcgttcgggctcc

SEQ ID NO: 945 - DNA, 251 bp, Artificial Sequence
  Description of Artificial Sequence: Synthetic polynucleotide
tgggaaaaagtgggggctcacgcagcatttataaggctcccatacctaaagacatttcacggttatggtgacttccccacaatacatagcgacatgcaaatatcgcggggcgtgcggcctccccctgtcccgtgtaggcgtcttctcagccaggacgcacgcgcgctgcgtgttcccgccctgagtgacttctgggccggcgatttccctgggaggagggttgatgacgtcatcgccaacgttcgggctcc

SEQ ID NO: 946 - DNA, 285 bp, Artificial Sequence
  Description of Artificial Sequence: Synthetic polynucleotide
tgggaaaaagtggggctcacgcagaatttataaggctcccatacctaaagacatttcacggttatggtgacttcccccacaatacatagcgacatgcaaatatcatggtccttccgcggggcgtgcggcctccccctgtcccgtaccccgcaggcgtcttctcagccaggaggcgcacgcggcgcgctgcgccctgttcccgccctgagtgactagggattctgggcccgcgatttccctgggaggcgggttggatgacgtcagcatcgccagcgttcgggctcc

SEQ ID NO: 947 - DNA, 286 bp, Artificial Sequence
  Description of Artificial Sequence: Synthetic polynucleotide
tgggaaaaagtgggggctcacgcagaatttataaggctcccatacctaaagacatttcacggttatggtgacttcccccacaatacatagcgacatgcaaatatcatggtccttccgcggggcgtgcggcctccccctgtcccgtaccccgtaggcgtcttctcagccaggagacgcacgcggcgcgctgcgccctgttcccgccctgagtgactagggattctgggccggcgatttccctgggaggcgggttggatgacgtcagcatcgccagcgttcgggctcc

SEQ ID NO: 948 - DNA, 273 bp, Artificial Sequence
  Description of Artificial Sequence: Synthetic polynucleotide
tggggaaaggtgggctcaagcagaatttataaggctcccaaaactaaagacatttttcggttatggtgacttcccccacaatacacagcgacatgcaaatatcatggcccttccgtggagtgtgccctccctgcgctcgtcccccgggcctcttctcagccaggaggcgcacggcgcgctgcgcctgttcccgccctggggactaggagcgcgcccgcggttcccgctgggaggcgggttggatgacgtcagcatcgccagcgttcggactcc

SEQ ID NO: 949 - DNA, 261 bp, Artificial Sequence
  Description of Artificial Sequence: Synthetic polynucleotide
tggggagtggggggctcaggccgaatttataaggctcccaaaacggaagacatttttcagttatggtgacttcccccacaagacacagcgctatgcaaatatcatggcccctccgtggagtgtgccctccccggccgcttctcagccaggaagcgcacggcgcgtctgcgcctgtttcccgccctggggactagaaaagcgcccgcgcatcccggccgggccgcgggttgatgacgtcagcatcgccagcgctcgagcgcc

SEQ ID NO: 950 - DNA, 280 bp, Artificial Sequence
  Description of Artificial Sequence: Synthetic polynucleotide
tggggaaaggtgggctcaagcagaatttataaggctcccaaacctaaagacattttacggttatggtgacttcccccacaacacacagcgacatgcaaatatcatggtccttccgtggagtgtgccctccctgcgctcgtcccccgggcctcttctcagccaggaggcgcacgcgcgcacgcgcgctgcgcctgttcccgccctggtgactaggagcgcgcccgcggttcccgctgggaggcgggttggatgacgtcagcatcgccagcgtttggactcc

SEQ ID NO: 951 - DNA, 288 bp, Artificial Sequence
  Description of Artificial Sequence: Synthetic polynucleotide
tgggaaaaagtggggctcaagcagaatttataaggctcccaaacctaaagacattttacggttatggtgacttcccccacaacacacagcgacatgcaaatatcatggtccttccgcggggtgtgcggcctccctgctctcgtcccccaggcgtcttctcagccaggaggcgcacgcgcgcacgcgcgctgcgccctgttcccgccctggtgactagggagcctgagcccgcgatttcccgctgggaggcgggttggatgacgtcagcatcgccagcgtttggactcc

SEQ ID NO: 952 - DNA, 261 bp, Artificial Sequence
  Description of Artificial Sequence: Synthetic polynucleotide
tggggagtggggggctcaggccgaatttataaggctcccaaaacggaagacatttttcagttatggtgacttcccccacaagacacagcgctatgcaaatatcatggcccctccgtggagtgtgccctggccccggccgcttctcagccaggaagcgcacggcgcgctgcgcctgttcccgccctggggactagaaaagcgcccgcgcatcccgccgggccgcgggttggatgacgtcagcatcgccagcgctcgagcgcc

SEQ ID NO: 953 - DNA, 262 bp, Artificial Sequence
  Description of Artificial Sequence: Synthetic polynucleotide
tggggagtggcggcctcaggcgggatttataaggctcccaaaaccggtgccatttctcagtgagggtgacttcccccacaatacacagcggtatgcaaatatcagttgcgtcagagtagagcgcggcctccccggcctctcctcagccaggaagcgcgcggcgctcctgttttcgtctcccgccccggtgacgagagacgcgcgcgcgcaccgtagccgggccgcgggttggtgacgtaagcggcatccgctttcgagcgcc

SEQ ID NO: 954 - DNA, 218 bp, Artificial Sequence
  Description of Artificial Sequence: Synthetic polynucleotide
cggcaaataacgcgcgcaaacagcatttataatgagctcatacctaaagccactttacggttacggtgacttcccacaagacattgcggcatgcaaatattttagtgcgtcccgcccctggtagttccacgctaggacgcacacgcactacggttcccgcctttagactgcgctggcgattccagcgagcggactgatgacgtcagcgttggggctcc

SEQ ID NO: 955 - DNA, 218 bp, Artificial Sequence
  Description of Artificial Sequence: Synthetic polynucleotide
cggcgaacaacgcgcgcaaacagcatttataatgcgctcatacctaaagccacttttcggttacggtgacttcccacaagacattgcggcatgcaaatattttagtgcgtcccgcccctggtagttccacgctaggacgcacacgcactacggttcccgcctttagactgcgctggcgattccagcgagcggactgatgacgtcagcgttggggctcc

SEQ ID NO: 956 - DNA, 218 bp, Artificial Sequence
  Description of Artificial Sequence: Synthetic polynucleotide
cggcaaacaacgcgcgcaaacagcatttataatgagctcatacctaaagcaactttacggttacggtgacttcccacaagacattgcgacatgcaaatattttagtgtatcccgcccctggtagttccacgctaggacgcacacgcactccggttcccgcctttagactgcgctggcgattccagggagcgggctgatgacgtcagtgttcgggctcc

SEQ ID NO: 957 - DNA, 218 bp, Artificial Sequence
  Description of Artificial Sequence: Synthetic polynucleotide
cggcaaacaacgcgcgcaaacagcatttataatgagctcatacctaaagcaactttacggttacggtgacttcccacaagacattgcgacatgcaaatattttagtgtatcccgcccctggtagttccacgctaggacgcacacgcactccggttcccgcctttagactgcgctggcgattccagggagcggactgatgacgtcagtgttcgggctcc

SEQ ID NO: 958 - DNA, 218 bp, Artificial Sequence
  Description of Artificial Sequence: Synthetic polynucleotide
cggccaacagctcgcgcaaacagcatttataatgagctcatacctaaagcaactttacggttacggtgacttcccacaagacattgcgacatgcaaatattttagtgtatcccgcccctggtagttccacgctaggacgcacacgcactgcggttcccgcctttagactgcgctggcgattccagggagcggactgatgacgtcagtgttcgggctcc

SEQ ID NO: 959 - DNA, 218 bp, Artificial Sequence
  Description of Artificial Sequence: Synthetic polynucleotide
cggcaaacaatgcgcgcaaacagcatttataatgagctcatacctaaagccactttacggttacggtgacttcccacaagacattgcgatatgtaaatattttagtgcatcccgcccctggtagttccacgctaggacgcacacgcactacggttcccgcctttagattgcgctggcgattccagggagcggactgatgacgtcagcgttcgggctcc

SEQ ID NO: 960 - DNA, 218 bp, Artificial Sequence
  Description of Artificial Sequence: Synthetic polynucleotide
cggcaaacaacgcgcgcaaacagcatttataatgagctcatacctaaagcaacttttcggttacggtgacttcccacaagccattgcgacatgcaaatattttagtgtatcccgcccctggtagttccacgctaggacgcacacgcactccggttcccgcctttagactgcgctggcgattccggggagcgggctgatgacgtcagtgttcgggctcc

SEQ ID NO: 961 - DNA, 218 bp, Artificial Sequence
  Description of Artificial Sequence: Synthetic polynucleotide
cggcaaacaatgcgtgcacacagcacttataatgcgctcacacctaaagccacttttcagttacggtgacttcccacaagacattgcgatatgcaaatattttagcgcatcccgcccctggtagttccacgcgaggacgcacacgcactacggttcccgcctttagactgcgctggcgattccagggagcggcctgatgacgtcagcgttcgggctcc

SEQ ID NO: 962 - DNA, 218 bp, Artificial Sequence
  Description of Artificial Sequence: Synthetic polynucleotide
cggcaaacaatgcgtgcacacagcatttataatgcgctcacacctaaagccacttttcagttacggtgacttcccacaagacattgcgatatgcaaatattttagcgcgtcccgcccctggtagttccacgcgaggacgcacacgcactacggttcccgcctttagactgcgctggcgattccagggagcggcctgatgacgtcagcgttcgggctcc

SEQ ID NO: 963 - DNA, 218 bp, Artificial Sequence
  Description of Artificial Sequence: Synthetic polynucleotide
cggcaaacagtgcgcgcaaacagcatttataatgcgctcatacctaaagccacttttcggttacggtgacttcccacaagacattgcgacatgcaaatattttagtgcgtcccgcccctggtagttccacgctaggacgcacacgcactacggttcccgcctttagactgcgctggcgattcctgggagcggactgatgacgtcagcgttcgggctcc

SEQ ID NO: 964 - DNA, 218 bp, Artificial Sequence
  Description of Artificial Sequence: Synthetic polynucleotide
cggcaaacaacgcgcgcaaacagcatttataatgcgctcatacctaaagccactttacggttacggtgacttcccacaagacattgcgacatgcaaatattttagtgcatcccgcccctggtagttccacgctaggacgcacacgcactacggttcccgcctttagactgcgctggcgattccagggagcggactgatgacgtcagcgttcgggctcc

SEQ ID NO: 965 - DNA, 218 bp, Artificial Sequence
  Description of Artificial Sequence: Synthetic polynucleotide
cggcaaacaacgcgcgcaaacagcatttataatgagctcatacctaaagcaactttacggttacggtgacttcccacaagacattgcgacatgcaaatattttagtgtatcccgcccctggtagttccacgctaggacgcacacgcactacggttcccgcctttagactgcgctggcgattccagggagcggactgatgacgtcagtgttcgggctcc

SEQ ID NO: 966 - DNA, 218 bp, Artificial Sequence
  Description of Artificial Sequence: Synthetic polynucleotide
cggcaaacaacgcgcgcaaacagcatttataatgagctcatacctaaagcaactttacggttacggtgacttcccacaagacattgcgacatgcaaatattttagtgtatcccgcccctggtagttccacgctaggacgcacacgcactacggttcccgcctttagactgcgctggcgattccagggagcgggctgatgacgtcagcgcccgggctcc

SEQ ID NO: 967 - DNA, 219 bp, Artificial Sequence
  Description of Artificial Sequence: Synthetic polynucleotide
tggcaaacaatccgcgcaaacagcatttataatgcgctcatacctagagccacttttcggttacggtgacttctcacaagacattgggacatgcaaatattacagtgcgtcccgcccctggttagttctacgctaggacgcacacgcactacggttcccgcctttagactgcgctggcggttcctgggagcggactgatgacgtcagtgttcgggatcc

SEQ ID NO: 968 - DNA, 219 bp, Artificial Sequence
  Description of Artificial Sequence: Synthetic polynucleotide
tggcaaacaacgcgcgcaaacagcatttataatgcgctcatacctagagccacttttcggttacggtgacttctcacaagacattgggacatgcaaatattacagtgcgtcccgcccctggttagttctacgctaggacgcacacgcactacggttcccgcctttagactgcgctggcgattcctgggagcggactgatgacgtcagcgttcgggatcc

SEQ ID NO: 969 - DNA, 226 bp, Artificial Sequence
  Description of Artificial Sequence: Synthetic polynucleotide
tggcaaacaacgccggcgcaaacagcatttataatgcgctcatacctagagccacttttcggttacggtgacttctcaacaagacattgggacatgcaaatattacagtgcgtcccgcccctggtgtagttctacgctaggacgcacacgcactacggttcccgcctttagacgactgcgctggcgattcctgggagcggactgatgacgtcagcgttcgggatcc

SEQ ID NO: 970 - DNA, 219 bp, Artificial Sequence
  Description of Artificial Sequence: Synthetic polynucleotide
tggcaaacaccgcacgcaaatagcatttataatgtgctcatacctagagccacttttcggttacggtgacttctcaaaaagacagtgggacatgcaaatattacagtgcgtcccgcccctggtaggtctacgctaggacgcacgcgcactacggttcccgcctatagactgcgctggcgattcctgggagcggactgatgacgtcagcgttcgggatcc

SEQ ID NO: 971 - DNA, 226 bp, Artificial Sequence
  Description of Artificial Sequence: Synthetic polynucleotide
tggcaaacaacgccggcgcaaacagcatttataatgtgctcatacctagagccacttttcggttacggtgacttctcaacaagacattgggacatgcaaatattacagtgcgtcccgcccctggtgtagttctacgctaggacgcacgcgcactacggttcccgcctatagacgactgcgctggcgattcctgggagcggactgatgacgtcagcgttcgggatcc

SEQ ID NO: 972 - DNA, 226 bp, Artificial Sequence
  Description of Artificial Sequence: Synthetic polynucleotide
tggcaaacaacgccggcgcaaacagcatttataatgtgctcatacctagagccacttttcggttacggtgacttctcaaaaagacattgggacatgcaaatattacagtgcgtcccgcccctggtgtagttctacgctaggacgcacgcgcactacggttcccgcctatagacgactgcgctggcgattcctgggagcggactgatgacgtcagcgttcgggatcc

SEQ ID NO: 973 - DNA, 218 bp, Artificial Sequence
  Description of Artificial Sequence: Synthetic polynucleotide
tgccaaacaacgcgcgcaaacagcatttataatgcactcataagtagagccacttttcggttatggtgacttctcacaaggaattgggacatgcaaatattacagtgcgtcccgcccctggtagttctgcgctaggacgcagacgcactacggttcccgcctttagaccgcgctggcgattcctgggagcggactgatgacgtcagcgttcgggatcc

SEQ ID NO: 974 - DNA, 218 bp, Artificial Sequence
  Description of Artificial Sequence: Synthetic polynucleotide
tgccaaacaacgcgcgcaaacagcatttataatgcactcataagtagagccacttttcggttatggtgacttctcacaaggaattgggacatgcaaatattacagtgcgtcccgcccctggtagttctgcgctaggacgcagacgcactacggttcccgcctttagactgcgctggcgattcctgggagcggactgatgacgtcagcgttcgggatcc

SEQ ID NO: 975 - DNA, 214 bp, Artificial Sequence
  Description of Artificial Sequence: Synthetic polynucleotide
tgccaaacaacgcgcgcaaacagcatttataatgcactcataagtagagccacttttcggttatggtgacttctcacaaggaattgggacatgcaaatattacagtgcgtcccgcccctggtagttctacggacgcagacgcactacggttcccgcctttagactgcgctggcgattcctgggagcggactgatgacgtcagcgttcgggatcc

SEQ ID NO: 976 - DNA, 218 bp, Artificial Sequence
  Description of Artificial Sequence: Synthetic polynucleotide
tggcaaacaccgcgcgcaaccagcatttataatgcgctcgtacctaaaggcacttgtcggttacggtgacttcccacaagacattgcgacatgcaaatactacagtgcgtcccgcccctggtagttccacgctgggacgcacacgcagtacggttcccgcctttagactgcgctggcgattcctgggagaggattgatgacgtcagcgttcgggctcc

SEQ ID NO: 977 - DNA, 218 bp, Artificial Sequence
  Description of Artificial Sequence: Synthetic polynucleotide
cggcacaaaacgcgggcaaacagcatttataatgcgctcatacctaaagccactttacggttacggtgacttcccacaagacattgcgacatgcaaatattttagtgcgtcccgcccctggtagttccacgctaggacacacacgcactatgcttccggcctttagactgcgccggtgattccagggagcggactgatgacgtcagcgttccggctcc

SEQ ID NO: 978 - DNA, 218 bp, Artificial Sequence
  Description of Artificial Sequence: Synthetic polynucleotide
cggcaaaaaacgcgggcaaacagcatttataatgcgctcatacctaaagccactttacggttacggtgacttcccacaagacattgcgacatgcaaatattttagtgcgtcccgcccctggtagttccacgctaggacacacacgcactatggttccggcctttagactgcgccggtgattccagggagcggactgatgacgtcagcgttcgggctcc

SEQ ID NO: 979 - DNA, 218 bp, Artificial Sequence
  Description of Artificial Sequence: Synthetic polynucleotide
cggcaaacaacgcgcgcaaacagcatttataatgcgctcatacctaaagccactttacggttacggtgacttcccacaagacattgcgacatgcaaatattttagtgcgtcccgcccctggtagttccacgctaggacgcacacgcactacggttcccgcctttagactgcgctggcgattccagggagcggactgatgacgtcagcgttcgggctcc

SEQ ID NO: 980 - DNA, 218 bp, Artificial Sequence
  Description of Artificial Sequence: Synthetic polynucleotide
tggcgaataacacgcgcaaagagcatttataacgcgctcagacctaaagccacttgtcgcttacggtgacttcccataagacattgcaatatgcaaatactccagtgcgtcccgcccctggcagttccacgctgggacgtgcacgcactacggttcccgcctttagactgcgctcgcgattcctgggagagggctgatgacgtcagcgttcgggctcc

SEQ ID NO: 981 - DNA, 218 bp, Artificial Sequence
  Description of Artificial Sequence: Synthetic polynucleotide
tggcgaaaatcacgcgcaaagagcatttataacgtgctcagacctaaagccacttgtcgcttacggtgactccccataagacattgcgatatgcaaatactgcagtgcgtcccgcccctggcagttccacgctgggacgtacacgtactacggttcccgcctttagactgcgctcgcgattcctgggagagggctgatgacgtcagcgttcgggctcc

SEQ ID NO: 982 - DNA, 218 bp, Artificial Sequence
  Description of Artificial Sequence: Synthetic polynucleotide
tggcgaaaaacacgcgcaaagagcatttataacgtgctcagacctaaagccacttgtcgcttacggtgactccccataagacattgcgatatgcaaatactgcagtgcgtcccgcccctggcagttccacgctgggacgtgcacgcactacggttcccgcctttagactgcgctcgcgattcctgggagagggctgatgacgtcagcgttcgggctcc

SEQ ID NO: 983 - DNA, 218 bp, Artificial Sequence
  Description of Artificial Sequence: Synthetic polynucleotide
cggcgaaaaacacgcgcaaagagcgtttataatgcgctcagacctaaagtaacttgtcacttacggtgacttcccataagacattgcgatatgcaaatattccagtgcgtcccgcccctggcagttccacgccgggacgtgcacgcactacggttcccgcctttagactgcgctggcgattcctgggagagggctgatgacgtcagcgtgcgggctcc

SEQ ID NO: 984 - DNA, 218 bp, Artificial Sequence
  Description of Artificial Sequence: Synthetic polynucleotide
cggcgaaaaacacgcgcaaagagcgtttataacgcgctcagacctaaagctacttgtcacttacggtgacttcccataagacattgcgatatgcaaatattccagtgcgtcccgcccctggcagttccacgctgggacgtgcacgcactacggttcccgcctttagactgcgctggcgattcctgggagagggctgatgacgtcagcgtgcgggctcc

SEQ ID NO: 985 - DNA, 218 bp, Artificial Sequence
  Description of Artificial Sequence: Synthetic polynucleotide
cggcgaaaaacacgcgcaaagagcgtttataacgcgctcagacctaaagctacttgtcacttacggtgacttcccataagacattgcgatatgcaaatattccagtgcgtcccgcccctggcagttccacgctgggacgtgcacgcactacggttcccgcctttagactgcgctggcgattcctgggagagggctgatgacgtcagcgttcgggctcc

SEQ ID NO: 986 - DNA, 218 bp, Artificial Sequence
  Description of Artificial Sequence: Synthetic polynucleotide
tggcgaaaaacacgcgcaaagagcatttataacgcgctcagacctaaagccacttgtcgcttacggtgacttcccataagacattgcgatatgcaaatattacagtgcgtcccgcccctggcagttccacgctgggacgtgcacgcactacggttcccgcctttagactgcgctggcgattcctgggagagggctgatgacgtcagcgttcgggctcc

SEQ ID NO: 987 - DNA, 218 bp, Artificial Sequence
  Description of Artificial Sequence: Synthetic polynucleotide
tggcgaaaaacacgcgcaaagagcatttataacgcgctcagacctaaagccacttgtcgcttacggtgacttcccataagacattgcgatatgcaaatactacagtgcgtcccgcccctggcagttccacgctgggacgtgcacgcactacggttcccgcctttagactgcgctcgcgattcctgggagagggctgatgacgtcagcgttcgggctcc

SEQ ID NO: 988 - DNA, 218 bp, Artificial Sequence
  Description of Artificial Sequence: Synthetic polynucleotide
tggcgaaaaacgcgcgcaaagagcatttataatgcgctcagacctaaagccacttgtcgcttacggtgacttcccataagacattgcgatatgcaaatattacagtgcgtcccgcccctggcagttccacgctgggacgtgcacgcactacggttcccgcctttagactgcgctggcgattcctgggagagggctgatgacgtcagcgttcgggctcc

SEQ ID NO: 989 - DNA, 218 bp, Artificial Sequence
  Description of Artificial Sequence: Synthetic polynucleotide
tggaggagaacgcgcgcaaagagcatttataatgcgcgcagacctaaagccacttgtcgcttacggtgacttcccataagacattgcgatatgcaaatattacagtgcgtcccgcccctggcagttccacgctgggacgtgcacgcgctacggttcccgcctttagactgcgctggcgattcctgggagagggctgatgacgtcagcattcgggctcc

SEQ ID NO: 990 - DNA, 222 bp, Artificial Sequence
  Description of Artificial Sequence: Synthetic polynucleotide
tggcaaaaactgagctcaagcagcatttataaggctcccaaacctaaagacatttgtcggttatggtgacttcccacaacacattgcgacatgcaaatactgcggagcgtaccccctcccctggcaactcctcgctgggacgcacgcgcgctacgtgttcccgccttttgactgcgccggcgatacctgggagagggttgatgacgtcagcgttcgggctcc

SEQ ID NO: 991 - DNA, 234 bp, Artificial Sequence
  Description of Artificial Sequence: Synthetic polynucleotide
tgggaaagggtgggctcacgcagcctttataaggctcccaaacttaaagacatttctcggttatggcgacttcccacaagacatagcgacatgcaaatactgcagacctgtggcgccgacccggtcctgtgcagccatctttacggctgggacgcacgcgcgctgcgtgttcccgccctgtgactgcgccggcgattactgggagaggattgatgacgtcaacgttcgggttcc

SEQ ID NO: 992 - DNA, 234 bp, Artificial Sequence
  Description of Artificial Sequence: Synthetic polynucleotide
tgagagagggtgggctcacgccacctttataaggctcccaaacttaaagacatttctcggttatggcgacttcccacaacacatagcgacatgcaaatactgcagacctgtggcgccgacccggtcctgtgcagccatctttacggctgggacgcacgcgcgctgcgtgttcccgccctgtgactgcgccggcgattactgggagaggattgatgacgtcaacgttcgggttcc

SEQ ID NO: 993 - DNA, 229 bp, Artificial Sequence
  Description of Artificial Sequence: Synthetic polynucleotide
cgtaggaaaactgcttctgtgagcacttataaaactcccataagtagagagatttcatagttatggtgacttcccataagacattgcgacatgcaaatattgtggcgcgttcgtccccgtccggtgcaggcagcttcgctccaggacgcacgcgcaatacatgttcccgccttgagactgcgccggcagattcctaggaagtggttgatgacgtcgatgttagggatcc

SEQ ID NO: 994 - DNA, 229 bp, Artificial Sequence
  Description of Artificial Sequence: Synthetic polynucleotide
cgtaggaaaactgcttctgtgagcacttataaaactcccataagtagagagatttcatagttatggtgacttcccataagacattgcgacatgcaaatattgtggcgcgttcgtccccgtccggtgcaggcagcttcgctccaggacgcacgcgcaatacatgttcccgccttgagactgcgccggccgattcctaggaagtggttgatgacgtcgatgttggggctcc

SEQ ID NO: 995 - DNA, 229 bp, Artificial Sequence
  Description of Artificial Sequence: Synthetic polynucleotide
cgtaggaaaactgcttctgtgagcacttataaaactcccataagtagagagatttcatagttatggtgacttcccataagacattgcgacatgcaaatattgtggcgcgttcgtccccgtccggtgcaggcagcttcgctccaggacgcacgcgcactacatgttcccgccttgagactgcgccggccgattcctaggaagtggttgatgacgtcgatgttggggctcc

SEQ ID NO: 996 - DNA, 230 bp, Artificial Sequence
  Description of Artificial Sequence: Synthetic polynucleotide
cggagaaaacctgcttcaccgagcatttataaagctcccatacttaaagagatttcatagttatggtgacttcccacaagacattgcgacatgcaaatattgtggagcgtacttccccgtcctgtgcaggcagcttcccgccaggacgcacgcgcgctgcgtgttcccgccttgagactgcgccggcgatttcctaggagggtggttgatgacgtcaatgttcgggctcc

SEQ ID NO: 997 - DNA, 219 bp, Artificial Sequence
  Description of Artificial Sequence: Synthetic polynucleotide
tgccgaaagtttagctcaacctgcatttataaggctcccaaacctaaagacatttgtcggttatggtgacttcccgcaacacattgcgacatgcaaatactgcggagcgtacctcccctggcaactcctcgctgggacgcacgcgcgctgcgtgctcccgccttttgactgcgccggcgatacttgggagagggttgatgacgtcagcgttctggctcc

SEQ ID NO: 998 - DNA, 219 bp, Artificial Sequence
  Description of Artificial Sequence: Synthetic polynucleotide
tgccgaaagtttagctcaacctgcatttataaagctcccaaacctaaagacatttgtcggttatggtgacttcccgcaacacattgcgacatgcaaatactgcggagtgcacctcccctggcaactcctcgctgggacgcacgcgcgctgcgtgctcccgccttttgactgcgccggcgatacttgggagagggttgatgacgtcagcgttctggctcc

SEQ ID NO: 999 - DNA, 222 bp, Artificial Sequence
  Description of Artificial Sequence: Synthetic polynucleotide
tgccgaaagtttagctcaacctgcatttataaggctcccaaacctaaagacatttgtcggttatggtgacttcccgcaacacattgcgacatgcaaatactgcggagcgtaccccctcccctggcaactcctcgctgggacgcacgcgcgctgcgtgctcccgccttttgactgcgccggcgatacttgggagagggttgatgacgtcagcgttctggctcc

SEQ ID NO: 1000 - DNA, 222 bp, Artificial Sequence
  Description of Artificial Sequence: Synthetic polynucleotide
tgccgaaagtttagctcaacctgcatttataaggctcccaaacctaaagacatttgtcggttatggtgacttcccgcaacacattgcgacatgcaaatactgcggagtgcaccccctcccctggcaactcctcgctgggacgcacgcgcgctgcgtgctcccgccttttgactgcgccggcgatacttgggagagggttgatgacgtcagcgttctggctcc

SEQ ID NO: 1001 - DNA, 222 bp, Artificial Sequence
  Description of Artificial Sequence: Synthetic polynucleotide
tgccgaaaatttagctcaagccgcatttataaggctcccaaacctaaatacatttgtcggttatggtgacttcccgcaacacattgcgacatgcaaatactgcggagcgtaccccctcccctggcaactcctcgctgggacgcacgcgcgctacgtgctcccgccttttgactgcgccggcgatacttgggagagggttgatgacgtcagcgttctggctcc

SEQ ID NO: 1002 - DNA, 219 bp, Artificial Sequence
  Description of Artificial Sequence: Synthetic polynucleotide
cgccgaaaaccaggctcaagccacatttataaggctcccaaagcgaaatacatttgtcggttatggtgacttcccgcaacacattgcgacatgcaaatactgcggagcgttcctcccctggcaactcctcgctgggacgcacgcgcactacgtgctcccgccttttgactgcgccggcgatacttgggagagagttgatgacgtcagcgttctggctcc

SEQ ID NO: 1003 - DNA, 219 bp, Artificial Sequence
  Description of Artificial Sequence: Synthetic polynucleotide
cgccgaaaaccaggctcaagccacatttataaggctcccaaaccgaaatacatttgtcggttatggtgacttcccgcaacacattgcgacatgcaaatactgcggagcgttcctcccctggcaactcctcgctgggacgcacgcgcactacgtgctcccgccttttgactgcgccggcgatacttgggagagggttgatgacgtcagcgttctggctcc

SEQ ID NO: 1004 - DNA, 219 bp, Artificial Sequence
  Description of Artificial Sequence: Synthetic polynucleotide
cgccgaaaaccaggctcaagccacatttataaggctcgcaaaccgaaatacatttgtcggttatggtgacttcccgcaacacattgcgacatgcaaatactgcggagcgttcctcccctggcaactcctcgctgggacgcacgcgcactacgtgctcccgccttttgactgcgccggcgatacttgggagagggttgatgacgtcagcgttctggctcc

SEQ ID NO: 1005 - DNA, 219 bp, Artificial Sequence
  Description of Artificial Sequence: Synthetic polynucleotide
cgccgaaaaccaggctcaagccacatttataaggctcccaaacctaagtacatttgtcggttatggtgacttcccgcaacacattgcgacatgcaaatactgcggagcgtccctcccctggcaactcctcgctgggacgcacgcgcgctacgtgctcccgccttttgactgcgccggcgatacttgggagagggttgatgacgtcagcgttctggctcc

SEQ ID NO: 1006 - DNA, 219 bp, Artificial Sequence
  Description of Artificial Sequence: Synthetic polynucleotide
cgccgaaaaccaggctcaagccacatttataaggctcccaaacctaagtacatttgtcggttatggtgacttcccgcaacacattgcgacatgcaaatactgcggagcgttcctcccctggcaactcctcgctgggacgcacgcgcgctacgtgctcccgccttttgactgcgccggcgatacttgggagagggttgatgacgtcagcgttctggctcc

SEQ ID NO: 1007 - DNA, 219 bp, Artificial Sequence
  Description of Artificial Sequence: Synthetic polynucleotide
cgccgaaaaccaggctcaagccacatttataaggctcccaaacctaaatacatttgtcggttatggtgacttcccgcaacacattgcgacatgcaaatactgcggagcgttcctcccctggcaactcctcgctgggacgcacgcgcgctacgtgctcccgccttttgactgcgccggcgatacttgggagagggttgatgacgtcagcgttctggctcc

SEQ ID NO: 1008 - DNA, 219 bp, Artificial Sequence
  Description of Artificial Sequence: Synthetic polynucleotide
tgccgaaaacctagctcaagccacatttataaggctcccaaacctaaatacatttgtcggttatggtgacttcccgcaacacattgcgacatgcaaatactgcggagcgtacctcccctggcaactcctcgctgggacgcacgcgcgctacgtgctcccgccttttgactgcgccggcgatacttgggagagggttgatgacgtcagcgttctggctcc

SEQ ID NO: 1009 - DNA, 219 bp, Artificial Sequence
  Description of Artificial Sequence: Synthetic polynucleotide
cgccgaaaaccaggctcaagccacatttataaggctcccaaacctaaatacatttgtcggttatggtgacttcccgcaacacattgcgacatgcaaatactgcggagcgtacctcccctggcaactcctcgctgggacgcacgcgcgctacgtgctcccgccttttgactgcgccggcgatacttgggagagggttgatgacgtcagcgttctggctcc

SEQ ID NO: 1010-1099 - skipped (90 entries)

SEQ ID NO: 1100 - DNA, 219 bp, Artificial Sequence
  Description of Artificial Sequence: Synthetic polynucleotide
cgccgaaagccaggctcaagccacatttataaggctcccaaacctaaatacatttgtcggttatggtgacttcccgcaacacattgcgacatgcaaatactgcggagcgtacctcccctggcaactcctcgctgggacgcacgcgcgctacgtgctcccgccttttgactgcgccggcgacacttgggagagggttgatgacgtcagcgttctggctcc

SEQ ID NO: 1101 - DNA, 222 bp, Artificial Sequence
  Description of Artificial Sequence: Synthetic polynucleotide
tggcaaaaactgagctcaagccgcatttataaggctcccaaacctaaagacatttgtcggttatggtgacttcccgcaacacattgcgacatgcaaatactgcggagcgtaccccctcccctggcaactcctcgctgggacgcacgcgcgctacgtgctcccgccttttgactgcgccggcgatacttgggagagggttgatgacgtcagcgttctggctcc

SEQ ID NO: 1102 - DNA, 222 bp, Artificial Sequence
  Description of Artificial Sequence: Synthetic polynucleotide
tgccgaaaacttagctcaagccgcatttataaggctcccaaacctaaatacatttgtcggttatggtgacttcccgcaacacattgcgacatgcaaatactgcggagcgtaccccctcccctggcaactcctcgctgggacgcacgcgcgctacgtgctcccgccttttgactgcgccggcgatacttgggagagggttgatgacgtcagcgttctggctcc

SEQ ID NO: 1103 - DNA, 219 bp, Artificial Sequence
  Description of Artificial Sequence: Synthetic polynucleotide
tgccgaaaacttagctcacgccgcacttataaggctcccaaacctaaatacatttgtaggttatggtgacttcccgcaacacattgcgacatgcaaatactgcggagcgtacctcccctggcaactcctcgctgggacgcacgcgcgctacgtgctcccgccttttgactgagccggcgatacttgggagagggttgatgacgtcagcgttctggctcc

SEQ ID NO: 1104 - DNA, 218 bp, Artificial Sequence
  Description of Artificial Sequence: Synthetic polynucleotide
tgccgaaagcttaccttcgcccgccttataaggctcccaaacctaaatacatttgtaggttatggtgacttcccgcaacacattgcgacatgcaaatactgcggagcgtacctcccctggaaactcctcgctgggacgcacgcgcgttacgtgctcccgccttttgactgagccggcgatacttgggagagggttgatgacgtcagcgttctggctcc

SEQ ID NO: 1105 - DNA, 230 bp, Artificial Sequence
  Description of Artificial Sequence: Synthetic polynucleotide
tgggaaagggtggccccgccgagcatttataagactcccatacctaaagacatttctcagttatggtgatttccctacaacacacagcaacatgcaaatatcgaggggtgtaccgcccctgtcctttgtagacgtcttctctccaggacgcacgcgcgctgtattcccgccttgtgactctaggcgggcgattcctgggagagggttgatgacgtccaagttctggcttc

SEQ ID NO: 1106 - DNA, 230 bp, Artificial Sequence
  Description of Artificial Sequence: Synthetic polynucleotide
tgggaaagggtggccccgccgagcatttataagactcccatacctaaagacatttctcagttatggtgacttccctacaacacacagcaacatgcaaatatcgaggggtgtaccgcccctgtcctttgtagacgtcttctctccaggacgcacgcgcgctgtattcccgccttgtgactctaggcgggcgattcctgggagagggttgatgacgtccaagttctggcttc

SEQ ID NO: 1107 - DNA, 227 bp, Artificial Sequence
  Description of Artificial Sequence: Synthetic polynucleotide
tgggaaagggtggctccgccgagcatttataagactcccatacctaaagacatttctcagttatggtgacttcccacaacgcacagcaacatgcaaatatcgaggggtgtaccgcccctgtcctttgtagacgtcttctctccaggacgcacgcgcgctgtattcccgccttgtgactaggcgggcgattcctgggagagggttgatgacgcccaagttctggcttc

SEQ ID NO: 1108 - DNA, 227 bp, Artificial Sequence
  Description of Artificial Sequence: Synthetic polynucleotide
tgggaaagggtggccccgccgagcatttataagactcccatacctaaagacatttctcagttatggtgacttcccacaacacacagcaacatgcaaatatcgaggggtgtaccgcccctgtcctttgtagacgtcttctctccaggacgcacgcgcgctgtattcccgccttgtgactaggcgggcgattcctgggagagggttgatgacgtccaagttctggcttc

SEQ ID NO: 1109 - DNA, 229 bp, Artificial Sequence
  Description of Artificial Sequence: Synthetic polynucleotide
tgggaaaggggggctccgctgagcgtttataaggctcccatacctaaagacatttcacagttatggtgacttcccacaacacacagcaacatgcaaatacagaggggtgtaccgcccctgtcctttgtagacgtcttctcgccaggacgcacgcgcgctgtgttcccgccttgtgactctaggcgggcgattcctgggagagggttgatgacgtccaagttctgactcc

SEQ ID NO: 1110 - DNA, 229 bp, Artificial Sequence
  Description of Artificial Sequence: Synthetic polynucleotide
tgggagagggaggttccgctgagcgtttataaggctcccatatctaaagacatttcacagttatggtgacttcccacaacacacagcaacatgcaaatacagagaagcgtaccacccctgtcctttgcagacgtcttctagccaggacgcacgcgcactgtgttcccgccttgtgactcgaggcgggcgatacctgggagagggttgatgacgtccaagttctgactcc

SEQ ID NO: 1111 - DNA, 230 bp, Artificial Sequence
  Description of Artificial Sequence: Synthetic polynucleotide
tgggaaagggtggctccgccgagcatttataaggctcccatacctaaagacatttctcagttatggtgacttccctacaacacacagcaacatgcaaatatcgaggggtgtaccgcccctgtcctttgtagacgtcttctcgccaggacgcacgcgcgctgtgttcccgccttgtgactctaggcgggcgattcctgggagagggttgatgacgtccaagttctgactcc

SEQ ID NO: 1112 - DNA, 230 bp, Artificial Sequence
  Description of Artificial Sequence: Synthetic polynucleotide
tgggaaagggtggctccgccgagcatttataaggctcccatacctaaagacatttctcagttatggtgacttccctacaacacacagcaacatgcaaatatcgaggggtgtaccgcccctgtcctttgtagacgtcttctctccaggacgcacgcgcgctgtgttcccgccttgtgactctaggcgggcgattcctgggagagggttgatgacgtccaagttctgactcc

SEQ ID NO: 1113 - DNA, 229 bp, Artificial Sequence
  Description of Artificial Sequence: Synthetic polynucleotide
caggcaaaagcagttcggccgagaatttataaggctccaatacctaaagacatttctcagttacggtgacttcccacaacacacagcaacatgcaaatatcgagaggtgtaccgcccctgtcctttgtagacgtcttctcttcgggacgcacgcgcgctgtgttcccgccttatgactctaggcgggcgattcctgggagagggttgatgacgtccaagttctgactcc

SEQ ID NO: 1114 - DNA, 229 bp, Artificial Sequence
  Description of Artificial Sequence: Synthetic polynucleotide
caggcaaaagcaattcggccgagaatttataaggctccaatacctaaagacatttctcagttacggtgacttcccacaacacacagcaacatgcaaatatcgagaggtgtaccgcccctgtcctttgtagacgtcttctcttcgggacgcacgcgcgctgtgttcccgccttatgactctaggcgggcgattcctgggagagggttgatgacgtccaagttctgactcc

SEQ ID NO: 1115 - DNA, 230 bp, Artificial Sequence
  Description of Artificial Sequence: Synthetic polynucleotide
tgggaaaaggtggctccacagagcatttataaggctcccatacctaaagacatttctcagttatggtgacttccctacaacacacagcaacatgcaaatatcgaggggtgtaccgcccctgtcctttgtagacgtcttctcgccaggacgcacgcgcgctgtgttcccgccttgtgactctaggcgggcgattcctgggagagggttgatgacgtccaagttctgactcc

SEQ ID NO: 1116 - DNA, 230 bp, Artificial Sequence
  Description of Artificial Sequence: Synthetic polynucleotide
tgggaaagggtggccccacagagcatttataaggctcccatacctaaagacatttctcagttatggtgacttcccacaacgcatagcaacatgcaaatatcgcggggagtacctcccctgtcccttgtacgcgtcttctcaggacgcacgcacgcgcgctgtgttcccgccctgtgactccaggcgggcaattcccgggagagggttgctgacgggaacgttcaggctcc

SEQ ID NO: 1117 - DNA, 229 bp, Artificial Sequence
  Description of Artificial Sequence: Synthetic polynucleotide
tgggaaagggtggtcctgaggcggatttataaggctcccacatctaaaggcatttcacagtcatggtgacttcccacaatacatagcaacatgcaaatttcgcggggagtacctcccctgtcccttgtacgcggcttctcaggacgcacgcacgcgctctgtgttcccgccctgtgactctaggagggcaattcctgggacagtgttctgacgggaacgttcaggctcc

SEQ ID NO: 1118 - DNA, 229 bp, Artificial Sequence
  Description of Artificial Sequence: Synthetic polynucleotide
tgggaaagggtggtcctgaggcggatttataaggctcccatatctaaaggcatttcacagtcatggtgacttcccacaatacatagcaacatgcaaatttcgcggggagtacctcccctgtcccttgtacgcggcttctcaggacgcacgcacgcgctctgtgttcccgccctgtgactctaggagggcaattcctgggacagtgttctgacgggaacgttcaggctcc

SEQ ID NO: 1119 - DNA, 229 bp, Artificial Sequence
  Description of Artificial Sequence: Synthetic polynucleotide
tgggaaaaggtggtcctggggcggatttataaggctcccatatctaaaggcatttcacagtcatggtgacttcccacaatacatagcaacatgcaaatatcgcggggagtacctcccctgtcccttgtacgcggcttctcaggacgcacgcacgcgctctgtgttcccgccctgtgactctaggcgggcaattcctgggacagtgttctgacgggaacgttcaggctcc

SEQ ID NO: 1120 - DNA, 230 bp, Artificial Sequence
  Description of Artificial Sequence: Synthetic polynucleotide
tggaaaagagtggccccagagagcatttataaggctcccgcacctaaatgcatttatcagttatggtgacttcccacaatacatagcaacatgcaaatatagcggggagtacctcccctgtcccttgtccgtgtcttctcaggacgcacgcacgcgcgctgtgttcccgccctgtgactctaagcgggcaattcctggaagaggcttgctgacgggaacgttcaggctcc

SEQ ID NO: 1121 - DNA, 230 bp, Artificial Sequence
  Description of Artificial Sequence: Synthetic polynucleotide
tgggaaagagtggccccagagagcatttataaggctcccgcacctaaatgcatttatcagttatggtgacttcccacaatacatagcaacatgcaaatatagcggggagtacctcccctgtcccttgtacgtgtcttctcaggacgcacgcacgcgcgctgtgttcccgccctgtgactctaagcgggcaattcctggaagaggcttgctgacgggaacgttcaggctcc

SEQ ID NO: 1122 - DNA, 230 bp, Artificial Sequence
  Description of Artificial Sequence: Synthetic polynucleotide
tgggaaagggtggccccagagagcatttataaggctcccgcacctaaatgcatttatcagttatggtgacttcccacaatacatagcaacatgtaaatatcgcggggagtacctcccctgtcccttgtacgtgtcttctcaggacgcacgcacgcgcgctgtgttcccgccctgtgactctaggcgggcaattcctggaagaggcttgctgacgggaacgttcaggctcc

SEQ ID NO: 1123 - DNA, 230 bp, Artificial Sequence
  Description of Artificial Sequence: Synthetic polynucleotide
tgggaaagggtggccccagagagcatttataaggctcccgcacctaaatgcatttatcagttatggtgacttcccacaatacatagcaacatgcaaatatcgcggggagtacctcccctgtcccttgtacgtgtcttctcaggacgcacgcacgcgcgctgtgttcccgccctgtgactctaggcgggcaattcctggaagaggcttgctgacgggaacgttcaggctcc

SEQ ID NO: 1124 - DNA, 230 bp, Artificial Sequence
  Description of Artificial Sequence: Synthetic polynucleotide
tgggaaacggtggccccaaagagcacttataaagccccctcacctaaatgcatttatcagttatggtgacttcccacaatacatagcaacatgcaaatatcgcggggagtacctcccctgtcccttgtacgtgtcttctcaggacgcacgcacgcgcgctgtgttcccgccctgtgactctaggtggacaattcctgggggaggcttgctgacgggaacgttccggctcc

SEQ ID NO: 1125 - DNA, 230 bp, Artificial Sequence
  Description of Artificial Sequence: Synthetic polynucleotide
tgggaaacggtggccccaaagagcatttataaagctccctcacctaaatgcatttatcagttatggtgacttcccacaatacatagcaacatgcaaatatcgcggggagtacctcccctgtcccttgtacgtgtcttctcaggacgcacgcacgcgcgctgtgttcccgccctgtgactctaggcgggcaattcctggaagaggcttgctgacgggaacgttccggctcc

SEQ ID NO: 1126 - DNA, 230 bp, Artificial Sequence
  Description of Artificial Sequence: Synthetic polynucleotide
tgggaaagggtggccccagcgagcatttataaggctcccgcatctaaagacattttacagttatggtgacttcccacaacgcgtagcaacatgcaaatatcgcagggagtaccgcccctgtcccttgtacgcgtcttctcagcacgcacgcacgcgcgctgtgttcccgccctgtgactccaggcgggtatttcccggggcgggtttgctgacaagaacgttcaggctcc

SEQ ID NO: 1127 - DNA, 230 bp, Artificial Sequence
  Description of Artificial Sequence: Synthetic polynucleotide
tgggaaagggtgggcccagcgagcatttataaggctcccgcatctaaagacattttacaattatggtgacttcccacaacgcgtagcaacatgcaaatatcgcagggagtaccgcccctgtcccttgtacgcgtcttctcagcacgcacgcacgcgcgctgtgttcccgccctgtgactccaggcgggtatttcccggggcgggtttgctgacaagaacgttcaggctcc

SEQ ID NO: 1128 - DNA, 230 bp, Artificial Sequence
  Description of Artificial Sequence: Synthetic polynucleotide
tgggaaagggtggccccagagagcatttataaggctcccgcacctaaaggcatttaacagttatggtgacttcccacaacgcgtagcaacatgcaaatatcgcagggagtaccgcccctgtcccttgtacgcatcttctcaggacgcacgcacgcgcgctgtgttcccgccctgtgactccaggcgggcatttcccggggcgggtttgctgacaggaacgttcaggctcc

SEQ ID NO: 1129 - DNA, 231 bp, Artificial Sequence
  Description of Artificial Sequence: Synthetic polynucleotide
tgggaaaaggtggccccacagagcatttataaggctcccatacctaaagacatttctcagttatggtgacttccctacaatacatagcaacatgcaaatatcgcggggcgtacctcccctgtcccttgtaggcgtcttctcagccaggacgcacgcgcgctgtgttcccgccctgtgactctaggcgggcgattcctgggagagggttgatgacgtcaacgttcgggctcc

SEQ ID NO: 1130 - DNA, 230 bp, Artificial Sequence
  Description of Artificial Sequence: Synthetic polynucleotide
tgggaaagggtggccccagagagcatttataaggctcccatacctaaaggcatttctcagttatggtgacttcccacaacgcatagcaacatgcaaatatcgcggggagtacctcccctgtcccttgtacgcgtcttctcaggacgcacgcacgcgcgctgtgttcccgccctgtgactccaggcgggcaattcccgggagagggttgctgacgggaacgttcaggctcc

SEQ ID NO: 1131 - DNA, 230 bp, Artificial Sequence
  Description of Artificial Sequence: Synthetic polynucleotide
tgggaaagggtggccccagagagcatttataaggctcccgcacctaaaggcattttacagttatggtgacttcccacaacgcgtagcaacatgcaaatatcgcggggagtaccgcccctgtcccttgtacgcgtcttctcaggacgcacgcacgcgcgctgtgttcccgccctgtgactccaggcgggcaattcccggggcgggtttgctgacgggaacgttcaggctcc

SEQ ID NO: 1132 - DNA, 230 bp, Artificial Sequence
  Description of Artificial Sequence: Synthetic polynucleotide
tgggaaagggtggccccagagagcatttataaggctcccatacctaaaggcatttctcagttatggtgacttcccacaatacatagcaacatgcaaatatcgcggggagtacctcccctgtcccttgtacgcgtcttctcaggacgcacgcacgcgcgctgtgttcccgccctgtgactctaggcgggcaattcctgggagagggttgctgacgggaacgttcaggctcc

SEQ ID NO: 1133 - DNA, 230 bp, Artificial Sequence
  Description of Artificial Sequence: Synthetic polynucleotide
tgggaaagggtggccccagcgagcatttataaggctcccgcatctaaagacattttacagttatggtgacttcccacaacgcgtagcaacatgcaaatatcgcagggagtaccgcccctgtcccttgtacgcgtcttctcaggacgcacgcacgcgcgctgtgttcccgccctgtgactccaggcgggtatttcccggggcgggtttgctgacaggaacgttcaggctcc

SEQ ID NO: 1134 - DNA, 230 bp, Artificial Sequence
  Description of Artificial Sequence: Synthetic polynucleotide
tgggaaagggtggccccagcgagcatttataaggctcccgcatctaaagacattttacagttatggtgacttcccacaacgcgtagcaacatgcaaatatcgcagggagtaccgcccctgtcccttgtacgcgtcttctcagcacgcacgcacgcgcgctgtgttcccgccctgtgactccaggcgggtatttcccggggcgggtttgctgacaggaacgttcaggctcc

SEQ ID NO: 1135 - DNA, 230 bp, Artificial Sequence
  Description of Artificial Sequence: Synthetic polynucleotide
tgggaaagggtggccccaccgagcatttataaggctcccgcatctaaagacattttacagttatggtgacttcccacaacgcgtagcaacatgcaaatatcgcggagagtaccgcccctgtcccatgcacgcgtcttctcagcacgcacgcacgcgcgctgtgttcccgccctgtgactccaggcgggtatttccaggggcgggtttgctgacaggaacgttcaggcttc

SEQ ID NO: 1136 - DNA, 230 bp, Artificial Sequence
  Description of Artificial Sequence: Synthetic polynucleotide
tgggaaaaggtggccccagagagcatttataaggctcccatacctaaaggcatttctcagttatggtgacttcccacaatacatagcaacatgcaaatatcgcggggagtacctcccctgtcccttgtacgcgtcttctcaggacgcacgcacgcgcgctgtgttcccgccctgtgactctaggcgggcaattcctgggagagggttgctgacgggaacgttcaggctcc

SEQ ID NO: 1137 - DNA, 270 bp, Artificial Sequence
  Description of Artificial Sequence: Synthetic polynucleotide
tgggaaaaagtggggcctcacgcagcatttataaggctcccatacctaaagacatttcacggttatggtgacttcccccacaatacatagcgacatgcaaatatcatggtccttccgcggggcgtgcctccccctgtcccttggcccgtaggcgtcttctcagccaggagacgcacgcggcgcgctgcgtgttcccgccctgtgacttctaggcgggcgattccctgggagagggttggatgacgtcagcatcgccaacgttcgggctcc

SEQ ID NO: 1138 - DNA, 233 bp, Artificial Sequence
  Description of Artificial Sequence: Synthetic polynucleotide
tgggaaaaggtgggcccacgcagaatttataaggctcccatacctaaagacattttacgattatggtgacttcccacaatacatagcgacatgcaaatatcgcggggcgtgcctcccctgtcccgtcacaggcgtcttctcagccagggcgcacgcgcgctgcgtgttcccgccctgtgactctgggcccgcgattcctgggagcgggttgatgacgtcagcgttcgggctcc

SEQ ID NO: 1139 - DNA, 231 bp, Artificial Sequence
  Description of Artificial Sequence: Synthetic polynucleotide
tgggaaagggtggacccaccgagcatttataaggctcccgcatctaaagacattttacagttatggtgacttcccacaacgcgtagcaacatgcaaatatcgtggagagtaccgcccctgtcccatgcacgcgtcttctcagcacgcacgcacgcgcgctgtgtttcccgccctgtgactccaggcgggtatttccaggggcgggtttgctgacaggaacgttcaggcttc

SEQ ID NO: 1140 - DNA, 249 bp, Artificial Sequence
  Description of Artificial Sequence: Synthetic polynucleotide
tgggaaaaggtgggcccacgcagaatttataaggctcccatacctaaagacatttcacgattatggtgacttcccacaatacatagcgacatgcaaatatcgcggggcgtgcctccccctgtcccgtaccccacaggcgtcttctcagccagggcgcacgcgcgctgcgtgttcccgccctgagtgactagggattctgggcccgcgattcccgtgggagcgggttgatgacgtcagcgttcgggctcc

SEQ ID NO: 1141 - DNA, 248 bp, Artificial Sequence
  Description of Artificial Sequence: Synthetic polynucleotide
tgggaaaaggtgggcccacgcagaatttataaggctcccatacctaaagacatttcacgattatggtgacttcccacaatacatagcgacatgcaaatatcgcggggcgtgcctcccctgtcccgtaccccacaggcgtcttctcagccagggcgcacgcgcgctgcgtgttcccgccctgagtgactagggattctgggcccgcgattcccgtgggagcgggttgatgacgtcagcgttcgggctcc

SEQ ID NO: 1142 - DNA, 237 bp, Artificial Sequence
  Description of Artificial Sequence: Synthetic polynucleotide
tgggaaaaggtgggcccacgcagaatttataaggctcccatacctaaagacattttacgattatggtgacttcccacaatacatagcgacatgcaaatatcgcggggcgtgcctcccctgtcccgtcacaggcgtcttctcagccagggcgcacgcgcgctgcgtgttcccgccctgagtgactctgggcccgcgattcccgtgggagcgggttgatgacgtcagcgttcgggctcc

SEQ ID NO: 1143 - DNA, 232 bp, Artificial Sequence
  Description of Artificial Sequence: Synthetic polynucleotide
tgggaaaaggtgggcccacggagaatttataaggctcccatacctaaagacattttacgattatggtgacttcccacaacacatagcgacatgcaaatatcgcggggcgtgcctcccctgtcccgtacaggcgtcttctcagccagggcgcacgcgcgctgcgtgttcccgccctgtgactccgggcccgcgattcctgggagcgggttgatgacgtcagcgttcgggctcc

SEQ ID NO: 1144 - DNA, 230 bp, Artificial Sequence
  Description of Artificial Sequence: Synthetic polynucleotide
tgggaaagggtggccccagagagcatttataaggctcccgcacctaaaggcattttacagttatggtgacttcccacaacgcgtagcaacatgcaaatatcgcagggagtaccgcccctgtcccttgtacgcgtcttctcaggacgcacgcacgcgcgctgtgttcccgccctgtgactccaggcgggcatttcccggggcgggtttgctgacaggaacgttcaggctcc

SEQ ID NO: 1145 - DNA, 230 bp, Artificial Sequence
  Description of Artificial Sequence: Synthetic polynucleotide
tgagaaagggtggctccacagagcatttataaggctcccatacctaaagacatttctcagttatggtgacttcccacaacgcatagcaacatgcaaatatcgcggggagtacctcccctgtcccttgtacgcgtcttctcaggacgcacgcacgcgcgctgtgttcccgccctgtgactccaggcgggcaattctcgggagggggttgctgacgggaacgttcaggctcc

SEQ ID NO: 1146 - DNA, 228 bp, Artificial Sequence
  Description of Artificial Sequence: Synthetic polynucleotide
tggggaaaaacagctcacggcggcatttataagactcacagatctaaagccatttcacgaatagggtgacttcccacaatacacagcgacatgcaaacatagcggggcgtgcctttcctgtaccctgtgggcatctctcctggacgcacgcgcgccgggtgttcccgcgctgtgactctaggcaagcgcttcctgggagagagttgatgacggcagcattcgggctcc

SEQ ID NO: 1147 - DNA, 232 bp, Artificial Sequence
  Description of Artificial Sequence: Synthetic polynucleotide
tggggaaaagcgggctccaggcagcatttataagactcacatatctaaagacatttcacggttagggtgacttcccacaatacacagcgacatgcaaatatcgcggggcgtgcctcccctgtcccttgtgggcatcttctcgcctggacgcacgcgcgccgcgtgttcccgccctgtgactctaggcgggcgattcctgggagagggttgatgacgtcaacattcgggctcc

SEQ ID NO: 1148 - DNA, 232 bp, Artificial Sequence
  Description of Artificial Sequence: Synthetic polynucleotide
cggagcaaacaggccaccaggcagcctttataagactcacatatctaaagacatttcacagttagggtgacttcccacagtacacagcgatatgcaaatatcgcggagcgtgcctccccagtctctggcgggcatcttctcgcctacacgcacgcgcgccgcgtgttcccgccctgtgacgctaggcgggccattcatgggagagggttgatgacgtcaacattcggactcc

SEQ ID NO: 1149 - DNA, 232 bp, Artificial Sequence
  Description of Artificial Sequence: Synthetic polynucleotide
tggagaaaagcgggctccaggcagcatttataagactcacatatctaaagacatttcacagttagggtgacttcccacaatacacagcgacatgcaaatatcgcggagcgtgcctcccctgtctcttgtgggcatcttctcgcctggacgcacgcgcgccgcgtgttcccgccctgtgacgctaggcgggcgattcctgggagagggttgatgacgtcaacattcgggctcc

SEQ ID NO: 1150 - DNA, 269 bp, Artificial Sequence
  Description of Artificial Sequence: Synthetic polynucleotide
tgggaaaaagaggggcttcacgcagcatttataaggctcccatatctaaagacatttcacggttagggtgacttcccccacaatacatagcgacatgcaaatatcatggtccttccgcggggcgtgcctccccctgtcccttggcccgtgggcatcttctcgccaggagacgcacgcggcgcgctgcgtgttcccgccctgtgacttctaggcgggcgattccctgggagagggttggatgacgtcagcatcgccaacattcgggctcc

SEQ ID NO: 1151 - DNA, 231 bp, Artificial Sequence
  Description of Artificial Sequence: Synthetic polynucleotide
tgaagaaaggcggctctaagcagcatttataagactcacatatctgaagacatttcacagttagggtgacttcccacaagacacagcgacatgcaaatatcgcggaatgtgcttcccctgtctcctgtgggcatcttctcgcctggacgcacgcgcaccgcgtgttcccgccctgtgacgctaggcgggcgattcctgggagagggttgatgacgtcaacactcgggctcc

SEQ ID NO: 1152 - DNA, 231 bp, Artificial Sequence
  Description of Artificial Sequence: Synthetic polynucleotide
tgggaaagggtggtcccatacagaacttataagattcccatatccaaagacatttcacgtttatggtgatttcccagaacacatagcgacatgcaaatattgcagggcgccactcccctgtccctcacagccatcttcctgccagggcgcacgcgcgctgggtgttcccgcctagtgacactgggcccgcgattccttggagcgggttgatgacgtcagcgttcgaattcc

SEQ ID NO: 1153 - DNA, 231 bp, Artificial Sequence
  Description of Artificial Sequence: Synthetic polynucleotide
tgggaaagggtggtcccacacagaacttataagactcccatatccaaagacatttcacgtttatggtgatttcccagaacacatagcgacatgcaaatattgcagggcgccactcccctgtccctcacagccatcttcctgccagggcgcacgcgcgctgggtgttcccgcctagtgacactgggcccgcgattccttggagcgggttgatgacgtcagcgttcgaattcc

SEQ ID NO: 1154 - DNA, 231 bp, Artificial Sequence
  Description of Artificial Sequence: Synthetic polynucleotide
tggggaagggtggtcccatacagaacttataagattcccatacccaaagacatttcacgtttatggtgacttcccagaagacatagcgacatgcaaatattgcagggcgtcactcccctgtccctcacagccatcttcctgccagggcgcacgcgcgctgggtgttcccgcctagtgacactgggcccgcgattccttggagcgggttgatgacgtcagcgttcgaattcc

SEQ ID NO: 1155 - DNA, 233 bp, Artificial Sequence
  Description of Artificial Sequence: Synthetic polynucleotide
tggggaagggtggtcccatacagaacttataagattcccatacccaaagacatttcacgtttatggtgacttcccagaagacatagcgacatgcaaatattgcagggcgtcactccccctgtccctcaacagtcatcttcctgccagggcgcacgcgcgctgggtgttcccgcctagtgacactgggcccgcgattccttggagcgggttgatgacgtcagcgttcgaattcc

SEQ ID NO: 1156 - DNA, 231 bp, Artificial Sequence
  Description of Artificial Sequence: Synthetic polynucleotide
tgggaaagggtggtcccatacagaacttataagattcccatacccaaagacatttcacgtttatggtgacttcccagaacacatagcgacatgcaaatattgcagggcgtcactcccctgtccctcacagccatcttcctgccagggcgcacgcgcgctgggtgttcccgcctagtgacactgggcccgcgattccttggagcgggttgatgacgtcagcgttcgaattcc

SEQ ID NO: 1157 - DNA, 232 bp, Artificial Sequence
  Description of Artificial Sequence: Synthetic polynucleotide
tggggaaaggtggtcccatacagaacttataagattcccatactcaaagacatttcacgtttatggtgacttcccagaagacacagcgacatgcaaatattgtagggcgtcacaccccctgtccctcacagtcatcttcctgccagggcgcacgcgcgctgggtgttcccgcgtagtgacactgggcccgcgattccttggagcgggttgatgacgtcagcgttcgaattcc

SEQ ID NO: 1158 - DNA, 231 bp, Artificial Sequence
  Description of Artificial Sequence: Synthetic polynucleotide
tggggaaaggtggtcccacacagaacttataagattcccatactcaaagacatttctcgtttatggtgacttcccagaagacacagcgacatgcaaatattgtagggcgtcacacccctgtccctcacagtcatcttcctgccagggcgcacgcgcgctgggtgttcccgcgtagtgacactgggcccgcgattccttggagcgggttgatgacgtcagcgttcgaattcc

SEQ ID NO: 1159 - DNA, 233 bp, Artificial Sequence
  Description of Artificial Sequence: Synthetic polynucleotide
tggggaagggtggtcccatacagaacttataagattcccatactcaaagacatttcacgtttatggtgacttcccagaagacatagcgacatgcaaatattgcagggcgtcacaccccctgtccctcaacagtcatcttcctgccagggcgcacgcgcgctgggtgttcccgcgtagtgacactgggcccgcgattccttggagcgggttgatgacgtcagcgttcgaattcc

SEQ ID NO: 1160 - DNA, 232 bp, Artificial Sequence
  Description of Artificial Sequence: Synthetic polynucleotide
tggggaagggtggtcctacacagaacttataagactcccatactcaaagacatttcacgtttatggtgacttcccagaagacatagcgacatgcaaatattgcagggcgtcacaccccctgtcccttacagccatcttcctgccagggcgcacgcgcgctgggtgttcccgcgtagtgacactgggcccgcgattccttggagcgggttgatgacgtcagcgttcgaattcc

SEQ ID NO: 1161 - DNA, 233 bp, Artificial Sequence
  Description of Artificial Sequence: Synthetic polynucleotide
tggggaagggtggtcctacacagaacttataagactcccatactcaaagacatttcacgtttatggtgacttcccagaagacatagcgacatgcaaatattgcagggcgtcacaccccctgtcccttaacagtcatcttcctgccagggcgcacgcgcgctgggtgttcccgcgtagtgacactgggcccgcgattccttggagcgggttgatgacgtcagcgttcgaattcc

SEQ ID NO: 1162 - DNA, 232 bp, Artificial Sequence
  Description of Artificial Sequence: Synthetic polynucleotide
tggggaagggtggtcccatacagaacttataagattcccatactcaaagacatttcacgtttatggtgacttcccagaagacatagcgacatgcaaatattgcagggcgtcacaccccctgtccctcacagtcatcttcctgccagggcgcacgcgcgctgggtgttcccgcgtagtgacactgggcccgcgattccttggagcgggttgatgacgtcagcgttcgaattcc

SEQ ID NO: 1163 - DNA, 233 bp, Artificial Sequence
  Description of Artificial Sequence: Synthetic polynucleotide
tggggaagggtggtcccacacagaacttataagattcccatacccaaagacatttcacgattatggtgacttcccagaagacatagcgacatgcaaatattgcagggcgtgcctccccctgtccctcaacagtcgtcttcctgccagggcgcacgcgcgctgggtgttcccgcctagtgacactgggcccgcgattccttggagcgggttgatgacgtcagcgttcgaattcc

SEQ ID NO: 1164 - DNA, 230 bp, Artificial Sequence
  Description of Artificial Sequence: Synthetic polynucleotide
tggggaagggtggtcctacacagaacttataagattcccatacccaaagacatttcacgattatggtgacttcccagaagacacagcgacatgcaaatattgcaggtcgtgcctcgcctgtccctcacagtcgtcttcctgccagggcgcacgcgcgctgggtgtcccgccaactgacactgggctcgcgattccttggagcgggttgatgacgtcagcgttcgaattcc

SEQ ID NO: 1165 - DNA, 230 bp, Artificial Sequence
  Description of Artificial Sequence: Synthetic polynucleotide
tggggaagggtggtcccacacagaacttataagattcccatacccaaagacatttcacgattatggtgacttcccagaagacacagcgacatgcaaatattgcaggtcgtgcctcgcctgtccctcacagtcgtcttcctgccagggcgcacgcgcgctgggtttcccgccaactgacactgggctcgcgattccttggagcgggttgatgacgtcagcgttcgaattcc

SEQ ID NO: 1166 - DNA, 230 bp, Artificial Sequence
  Description of Artificial Sequence: Synthetic polynucleotide
tggggaagggtggtcctacgcagaacttataagattcccatacccaaagacatttcacgattatggtgacttcccagaatacacagcgacatgcaaatattgcaggtcgtgcctcgcctgtccctcacagtcgtcttcctgccagggcgcacgcgcgctgggtgtcccgccaactgacactgggctcgcgattccttggagcgggttgatgacgtcagcgttcgaattcc

SEQ ID NO: 1167 - DNA, 238 bp, Artificial Sequence
  Description of Artificial Sequence: Synthetic polynucleotide
tgaggaaaaatggttccacacagaatttataaggttcccaaatctaaagacatttcaccattatggtgatttcccacaacacatagcgacatgcaaatatctcagagcgtacctcccctgtcctatacgggcgtcaactcgccagggcgcacgcgcgctgtgtgtttcccgcctgtgactcgggactctgggcccgcgattcctcggagcgggttgagaacgtcagctccggtgcttc

SEQ ID NO: 1168 - DNA, 238 bp, Artificial Sequence
  Description of Artificial Sequence: Synthetic polynucleotide
tgaggaaaagtggttccacacagaatttataaggttcccaaatctaaagacatttcaccattatggtgatttcccacaacacatagcgacatgcaaatatctcagagcgtacctcccctgtcctatacgggcgtcaactcgccagggcgcacgcgcgctgtgtgtttcccgcctgtgactcgggactctgggcccgcgattcctcggagcgggttgataacgtcagctccggtgcttc

SEQ ID NO: 1169 - DNA, 243 bp, Artificial Sequence
  Description of Artificial Sequence: Synthetic polynucleotide
tgggaaaaggtgggcccacacagaatttataaggctcccatacctaaagacatttcacgattatggtgacttcccacaatacatagcgacatgcaaatatcgcggggcgtgcctcccctgtcccgtaccccacaggcgtcttctcgccagggcgcacgcgcgctgcgtgttcccgccctgtgactagggattctgggcccgcgattcctgggagcgggttgatgacgtcagcgttcgggctcc

SEQ ID NO: 1170 - DNA, 243 bp, Artificial Sequence
  Description of Artificial Sequence: Synthetic polynucleotide
tgaggaaaagtgggcccacacagaatttataaggttcccaaacctaaagacatttcaccattatggtgacttcccacaatacatagcgacatgcaaatatctcagggcgtgcctcccctgtcccgtaccccacgggcgtcaactcgccagggcgcacgcgcgctgcgtgtttcccgcctgtgactcgggactctgggcccgcgattcctgggagcgggttgatgacgtcagctctggggcttc

SEQ ID NO: 1171 - DNA, 236 bp, Artificial Sequence
  Description of Artificial Sequence: Synthetic polynucleotide
tggcagaaagcggcccgccgccgcatttataaggctctcccacctaaagccatataatggttatggtgacttcccagaatacatggcaacatgcaaatatcgtgcggtatacctcccctgtcgcgcgtaggcgtctcctcccctggacgcacgggcgccgcatgttcccgccctatgactctgggccggcgactacgggagagagctgatgacgtgaccgcgaccgctcgggctcc

SEQ ID NO: 1172 - DNA, 236 bp, Artificial Sequence
  Description of Artificial Sequence: Synthetic polynucleotide
tgggaaaaagcggccccccgccgcatttataaggctctcccacctaaagacatttaacggttatggtgacttcccacaatacatagcaacatgcaaatatcgcgcggtatacctcccctgtcgcgcgtaggcgtctcctcccctggacgcacgggcgctgcgtgttcccgccctgtgactctgggccggcgactacgggagagagctgatgacgtgaccgcgaccgctcgggctcc

SEQ ID NO: 1173 - DNA, 219 bp, Artificial Sequence
  Description of Artificial Sequence: Synthetic polynucleotide
tgggaagtaagagattcacgccggttatataagattcctgtaactaaagaaatttcaaggatagggtgacttcccacaatacaaagcgacatgcaaatatcgcggggcgtgcctgtcctgacctttgtgagactcttcgctaggacgcaggcgtgctgcgagttcccgccttatcggcgagtcctgggggagagttgatgacgccaacattcgggctcc

SEQ ID NO: 1174 - DNA, 231 bp, Artificial Sequence
  Description of Artificial Sequence: Synthetic polynucleotide
tgggaaaaaaaggcttcacgcagattatataaggttcctgtacctaaagacatttcaaggttagggtgacttcccacaatacatagcgacatgcaaatatagcggggcgtgcctcccctgtcccttgtgggcgtcttctcgctaggacgcacgcgcgctgcgtgttcccgccttgtgactctaggtcggcgagtcctgggagagggttgatgacgtcaacattcgggctcc

SEQ ID NO: 1175 - DNA, 228 bp, Artificial Sequence
  Description of Artificial Sequence: Synthetic polynucleotide
tgcgtaaaatacgcttctcgcagattatataaggttcctgtacctaaagacatttcaagggtagggtgacttcccacaacacatagcgacatgcaaatatagggtgtgtctcccctggcccttgtgggcgtcttctcgctaggacgcacgcgcgctgcgttttcccgccttctggctctaggtcggcgagtcccgggaaaggattgattacgtcaacattcgggcttc

SEQ ID NO: 1176 - DNA, 231 bp, Artificial Sequence
  Description of Artificial Sequence: Synthetic polynucleotide
tgcgtaaaaaaggcttcacgcagattatataaggttcctgtacctaaagacatttcaaggttagggtgacttcccacaatacatagcgacatgcaaatataggggggtgtgtctcccctggcccttgtgggcgtcttctcgctaggacgcacgcgcgctgcgttttcccgccttgtgactctaggtcggcgagtcctgggaaaggattgattacgtcaacattcgggcttc

SEQ ID NO: 1177 - DNA, 231 bp, Artificial Sequence
  Description of Artificial Sequence: Synthetic polynucleotide
tgcgtaaaaaaggcttcacggtgactatataaggttcctgtacctaatgacatttcaagattagggtgacttcccacaatacatagcgacatgcaaataaaggggggtttctcgtctgtcccccctgtgggcgtcttcttgctaggacgcacgcgcgctgcgttttcccgccttgtgattctgggtcggcaagtcctgggaaaggattgattacgtcaacattcgggcttc

SEQ ID NO: 1178 - DNA, 237 bp, Artificial Sequence
  Description of Artificial Sequence: Synthetic polynucleotide
tgagaaaaaaaggccacacggagaatatataaggctcccatatctgaagacattttaagattagggtgatttcccacaatacatagcgacatgtaaatgtagtggggcatgccttccctgtcccttgtgggcagcttctcgccaggacgcacgcgcgctgcgtgttcccgccttgtgactaaattggcgagtctgggaggagactgatgatgtcagcatcatcaactttcccgctcc

SEQ ID NO: 1179 - DNA, 237 bp, Artificial Sequence
  Description of Artificial Sequence: Synthetic polynucleotide
tgagggaagactgtcgtagggagaatatataaggctcccatatcgctagacattttaagatgagggtgatttcccacaatgcatagcgacatgtaaatgaagtggggcatgctttccctgtcccttgtgggcagcttctcgccaggacgcacgcgcgctgcgtgttcccgccttgtgactaaattggcgagtctgggaggagactgatgatgtcagcatcatcaactttcccgctcc

SEQ ID NO: 1180 - DNA, 241 bp, Artificial Sequence
  Description of Artificial Sequence: Synthetic polynucleotide
tgggaaaaaaaggcttcacgcagaatatataaggctcccatatctaaagacatttcaaggttagggtgacttcccacaatacatagcgacatgcaaatatagcggggcgtgcctcccctgtcccttgtgggcatcttctcgccaggacgcacgcgcgctgcgtgttcccgccttgtgactctaggctggcgagtccctgggagagggttgatgacgtcagcatcgtcaacattcgggctcc

SEQ ID NO: 1181 - DNA, 237 bp, Artificial Sequence
  Description of Artificial Sequence: Synthetic polynucleotide
tgagaaaaaaaggcctcacgcagaatatataaggctcccatatctgaagacattttaagattagggtgatttcccacaatacatagcgacatgtaaatgtagtggggcatgcctcccctgtcccttgtgggcagcttctcgccaggacgcacgcgcgctgcgtgttcccgccttgtgactaaattggcgagtctgggaggagattgatgatgtcagcatcatcaactttcccgctcc

SEQ ID NO: 1182 - DNA, 237 bp, Artificial Sequence
  Description of Artificial Sequence: Synthetic polynucleotide
cgcgagaaaaattcttcacgcagaatatataaggatcccatatctgaagacattttacgattacggtgatttcccacaacacatagcgacatgtaaatgtagtggggcatgcctcccctgtcccttgtgggcagcttctcgccagaacgcacgcgcggtgcgtgttcccgccttgtgactaagttggcgagtcagggaggagattgatgatgtcatcatcgtcagctcacccgctcc

SEQ ID NO: 1183 - DNA, 237 bp, Artificial Sequence
  Description of Artificial Sequence: Synthetic polynucleotide
cgagagaaaaagtcttcacgcagaatatataaggatcccatatctgaagacattttacgattacggtgatttcccacaacacatagcgacatgtaaatgtagtggggcatgcctcccctgtcccttgtgggcagcttctcgccagaacgcacgcgcggtgcgtgttcccgccttgtgactaagttggcgagtcagggaggagattgatgatgtcatcatcgtcagctcacccgctcc

SEQ ID NO: 1184 - DNA, 237 bp, Artificial Sequence
  Description of Artificial Sequence: Synthetic polynucleotide
tgagaaaaaaaggcctcacgcagaatatataaggctcccatatctgaagacattttaaggttagggtgatttcccacaatacatagcgacatgtaaatgtagtggggcatgcctcccctgtcccttgtgggcagcttctcgccaggacgcacgcgcgctgcgtgttcccgccttgtgactaaattggcgagtctgggaggagattgatgacgtcagcatcatcaactttcccgctcc

SEQ ID NO: 1185 - DNA, 237 bp, Artificial Sequence
  Description of Artificial Sequence: Synthetic polynucleotide
tgagaaaaaaaggcctcacgcagaatatataaggctcccatatctgaagacattttaaggttagggtgatttcccacaatacatagcgacatgcaaatatagtggggcgtgcctcccctgtcccttgtgggcagcttctcgccaggacgcacgcgcgctgcgtgttcccgccttgtgactaaattggcgagtctgggaggggattgatgacgtcagcatcatcaactttcccgctcc

SEQ ID NO: 1186 - DNA, 262 bp, Artificial Sequence
  Description of Artificial Sequence: Synthetic polynucleotide
tgggaaaaagagggcttcacgcagaatatataaggctcccatatctaaagacatttcacggttagggtgacttcccccacaatacatagcgacatgcaaatatcatggtccttcagcggggcgtgcctcccctgtcccttgtgggcatcttctcgccaggacacgcacgcggcgcgctgcgtgttcccgccttgtgacttctaggcgggcgagtccctgggagagggttggatgacgtcagcatcgccaacattcgggctcc

SEQ ID NO: 1187 - DNA, 254 bp, Artificial Sequence
  Description of Artificial Sequence: Synthetic polynucleotide
tgggaaaaaaaggcttcacgcagaatatataaggctcccatatctaaagacatttcaaggttagggtgacttcccccacaatacatagcgacatgcaaatatcatggtccttcagcggggcgtgcctcccctgtcccttgtgggcatcttctcgccaggacgcacgcgcgctgcgtgttcccgccttgtgactctaggctggcgagtccctgggagagggttgatgacgtcagcatcgtcaacattcgggctcc

SEQ ID NO: 1188 - DNA, 230 bp, Artificial Sequence
  Description of Artificial Sequence: Synthetic polynucleotide
cgggaaaaaaacggcttctggtggaaaatatatgaggcccatacctgaagacctttcacggttatggtgacttcccacaatacatagcgacatgcaaatatagtggggcgtgcctccactgtcctttgcgggcatcgtctcgccaggaagcgcgcgctgcgtgttcccgccttttgactctaggcgggcgaatcctgggagagggttgttgacgtcaacattcgggctcc

SEQ ID NO: 1189 - DNA, 228 bp, Artificial Sequence
  Description of Artificial Sequence: Synthetic polynucleotide
caagagaaaaccgagccctgctggaaaatatatgaggcccactcttcaagaccttttatggttatggtaacttcccataacacatagcgacatgcaaatatcgtggggtgtgcctccacggtcctttgcggacaccgtcttgcccgtaagcgcgctgggtattcccgccttctgactctaggcgggcgaatcctaggagagggttgttgacgtcgacattcgggcacc

SEQ ID NO: 1190 - DNA, 230 bp, Artificial Sequence
  Description of Artificial Sequence: Synthetic polynucleotide
caagagagaaacgtgccctgctggaaaatatatgaggcccattcctcaagaccttttatggttatggtgacttcccacaacacatagcgacatgcaaatatcgtggggtgtgcctccactgtcctttgcggacaccgtcttgcccgtaagcgcgcgctgtgtattcccgccttttgactctaggcgggcgaatcctgggagagggttgttgacgtcgacattcgggctcc

SEQ ID NO: 1191 - DNA, 230 bp, Artificial Sequence
  Description of Artificial Sequence: Synthetic polynucleotide
caagaaagaaacgtcctctggtggaaaatatatgaggcccattcctcaagaccttttacggttatggtgacttcccacaacacatagcgacatgcaaatatcgtggggtgtgcctccactgtcctttgcggacaccgtcttgcccgtaagcgcgcgctgtgtattcccgccttttgactctaggcgggcgaatcctgggagagggttgttgacgtcgacattcgggctcc

SEQ ID NO: 1192 - DNA, 230 bp, Artificial Sequence
  Description of Artificial Sequence: Synthetic polynucleotide
caagaaagaaacgtcctctggtggaaaatatatgaggcccattcctcaagaccttttacggttatggtgacttcccacaatacatagcgacatgcaaatatcgtggggtgtgcctccactgtcctttgcggacaccgtcttgcccgtaagcgcgcgctgtgtattcccgccttttgactctaggcgggcgaatcctgggagagggttgttgacgtcgacattcgggctcc

SEQ ID NO: 1193 - DNA, 230 bp, Artificial Sequence
  Description of Artificial Sequence: Synthetic polynucleotide
caagaaagaaacgtgctctggtggaaaatatatgaggcccattcctcaagaccttttacggttatggtgacttcccacaacacatagcgacatgcaaatatcgtggggtgtgcctccactgtcctttgcggacaccgtcttgcccgtaagcgcgcgctgtgtattcccgccttttgactctaggcgggcgaatcctgggagagggttgttgacgtcgacattcgggctcc

SEQ ID NO: 1194 - DNA, 230 bp, Artificial Sequence
  Description of Artificial Sequence: Synthetic polynucleotide
cgggaaaaaaacggcctctggtggaaaatatatgaggcccatacctgaagacctttcacggttatggtgacttcccacaatacatagcgacatgcaaatatcgtggggcgtgcctccactgtcctttgcgggcatcgtctcgcccggaagcgcgcgctgtgtgttcccgccttttgactctaggcgggcgaatcctgggagagggttgttgacgtcaacattcgggctcc

SEQ ID NO: 1195 - DNA, 241 bp, Artificial Sequence
  Description of Artificial Sequence: Synthetic polynucleotide
tgggaaaaagagggcttcacgcggaatatataaggctcccatacctaaagacctttcacggttagggtgacttccccacaatacatagcgacatgcaaatatagtggggcgtgcctcccctgtcccttgcgggcatcttctcgccaggacacgcgcgcgccgcgctgcgtgttcccgccttttgacttctaggcgggcgaatcctgggagagggttggatgacgtccaacattcgggctcc

SEQ ID NO: 1196 - DNA, 232 bp, Artificial Sequence
  Description of Artificial Sequence: Synthetic polynucleotide
cgggaaaaaaagggcttctggcggaaaatatatgaggcccatacctgaagacctttcacggttatggtgacttcccacaatacatagcgacatgcaaatatagtggggcgtgcctcccctgtcccttgcgggcatcttctcgccaggaagcgcgcgcgctgcgtgttcccgccttttgactctaggcgggcgaatcctgggagagggttgatgacgtcaacattcgggctcc

SEQ ID NO: 1197 - DNA, 230 bp, Artificial Sequence
  Description of Artificial Sequence: Synthetic polynucleotide
caagagagaaacttgtcgtgctggaaaatatatgaggcccattcctcaggaccttttatggttagggtgatttcccacaatacatagcgacatgcaaatatagtggggtgtgcttccactgtcctttgcggacaccgtctcgcccgtaagcgcgcgctgtgtattcccgccttttgactctaggcgggcgaatcctgggagagggttgttgacgtcgacattcgggctcc

SEQ ID NO: 1198 - DNA, 230 bp, Artificial Sequence
  Description of Artificial Sequence: Synthetic polynucleotide
caagagagaaacttgtcgtgctggaaaatatatgaggcccattcctcaggaccttttatggttagggtgacttcccacaacacatagcgacatgcaaatatcgtggggtgtgcttccactgtcctttgcggacaccgtctcgcccgtaagcgcgcgctgtgtattcccgccttttgactctaggcgggcgaatcctgggagagggttgttgacgtcgacattcgggctcc

SEQ ID NO: 1199 - DNA, 227 bp, Artificial Sequence
  Description of Artificial Sequence: Synthetic polynucleotide
cgaggaaataatctcccctggtggcaaatataggaagcccattcctcaagaccttttaaggttacggtgacttcccacaatacatagcaacatgcaaatattgtggggtgtgccttcactgtcctttgcggtcactgtcttgcccataagcgcgctgtgtaatcccgccttttgacgttaggcaggcgaatcctgggagagggttgctgacgtcgacattcggctcc

SEQ ID NO: 1200 - DNA, 227 bp, Artificial Sequence
  Description of Artificial Sequence: Synthetic polynucleotide
caaggaagtaacgtcctctggtggaaaatatatgaggcccattcctcaagaccttttacggttatggtgacttcccacaatacatagcaacatgcaaatatcgtggggtgtgcctccactgtcctttgcggacactgtcttgcccgtaagcgcgctgtgtaatcccgccttttgactctaggcgggcgaatcctgggagagggttgttgacgtcgacattcggctcc

SEQ ID NO: 1201 - DNA, 215 bp, Artificial Sequence
  Description of Artificial Sequence: Synthetic polynucleotide
ggggagaaggcgctttccgcggattatataaggctccagcacctagaggcctttaacagttagggtgatttcccacaatgcatagcgacatgcaaatatagttgggtgtgctttccctgttccttgcctgcatcttcttgcctgcgtgttcccgccttttgactgcaggcgggcgaatcctgggagagagttgatgacgtcaacactcaggctcc

SEQ ID NO: 1202 - DNA, 240 bp, Artificial Sequence
  Description of Artificial Sequence: Synthetic polynucleotide
ggggagaaaggggcttcacggcgaatatataaggctcccgtacctaaaggcctttcacggttagggtgacttccccacaatacatagcgacatgcaaatatagttgggcgtgcctcccctgtcccttgcgggcatcttctcgcccggacacgcgcgcgccgcgctgcgtgttcccgccttttgacttccaggcgggcgaatcctgggagagggttggatgacgtccaacattcgggctcc

SEQ ID NO: 1203 - DNA, 232 bp, Artificial Sequence
  Description of Artificial Sequence: Synthetic polynucleotide
aggaagggagcctcacacggcggctatataaggccccctgccctgtaggcctttcacagttagggcgacttccccacaacacatagcgacatgcaaatgtggatgggcgtgcctccccggtccctgccggcaacttctctccgggacgcgcgctcgcgctgagtgttcccgccttttgacgccagcggagcgaatccggggagcgggcggatgacgtcaacagtgcggctcc

SEQ ID NO: 1204 - DNA, 232 bp, Artificial Sequence
  Description of Artificial Sequence: Synthetic polynucleotide
aggaagggagcctcacacggcggctatataaggccccctgccctgtaggcctttcacagttagggcgacttccccacaacacatagcgacatgcaaatgtagatgggcgtgcctccccggtccctgccggcaacttctctccgggacgcgcgctcgcgctgagtgttcccgccttttgacgccagccgagcgaatccggggagcgggcggatgacgtcaacagtgcggctcc

SEQ ID NO: 1205 - DNA, 232 bp, Artificial Sequence
  Description of Artificial Sequence: Synthetic polynucleotide
aggaagggagcctcacacggcggctatataaggccccctgccctgtaggcctttcacagttagggcgacttccccacaacacatagcgacatgcaaatgtggatgggcgtgcctccccggtccctgccagcaacttctctccgggacgcgcgctcgcgctgagtgttcccgccttttgacgccagcggagcgaatccggggagcgggcggatgacgtgaacagtgcggctcc

SEQ ID NO: 1206 - DNA, 235 bp, Artificial Sequence
  Description of Artificial Sequence: Synthetic polynucleotide
gggaagagagcctcacacggcggctatataaggcccccttacctataggccttttacggttagggtgacttccccacaacacatagcgacatgcaaatttagatgggcgtgcctcccctgtccctgtgggcaacttctctccgggacacgcgcgctcgcgctgagtgttcccgccttttgacttccagccgagcgaatcctgggagagggcagatgacgtcaacagtcaggctcc

SEQ ID NO: 1207 - DNA, 231 bp, Artificial Sequence
  Description of Artificial Sequence: Synthetic polynucleotide
gggaagagggcctcacacgagggctatataaggcccccttacctataggccttttacggttagagtgacttcccacaacacctagcgacatgcaaatttagatgggcgtgcctcctctgtccctgtggcaacacctctccgggacgcgcgctcgctctgagtgttcccgccttttgacttccagccgaacgaatcctgggagagggcagatgacgtcaatagtcaggctcc

SEQ ID NO: 1208 - DNA, 230 bp, Artificial Sequence
  Description of Artificial Sequence: Synthetic polynucleotide
gggaagagggcctcacacgagggctatataaggcccccttacctataggccttttatggttagagtgacttcccacaacacctagcgacatgcaaatttagatgggcgtgcctcctctgtccctgtggcaacacctctccgggacgcgcgctcgctctgagcgttcccgccttttgacttccagccgaacgaatcctgggagagggcagtgacgtcaatagtcaggctcc

SEQ ID NO: 1209 - DNA, 234 bp, Artificial Sequence
  Description of Artificial Sequence: Synthetic polynucleotide
gggaagagagcctcacacggcggctatataaggcccccttacctataggccttttacggttagggtgacttcccacaacacatagcgacatgcaaatttagatgggcgtgcctcccctgtccctgtgggcaacttctctccgggacacgcgcgctcgcgctgagtgttcccgccttttgacttccagccgagcgaatcctgggagagggcagatgacgtcaacagtcaggctcc

SEQ ID NO: 1210 - DNA, 235 bp, Artificial Sequence
  Description of Artificial Sequence: Synthetic polynucleotide
gggaagagaggcctacacggcggctatataaggcccccttacctataggccttttacggttagggtgacttccccacaacacatagcgacatgcaaatttagatgggcgtgcctcccctgtccctgtgggcaacttctctccgggacacgcgcgctcgcgctgagtgttcccgccttttgacttccagccgagcgaatcctgggagagggcagatgacgtcaacagtcaggctcc

SEQ ID NO: 1211 - DNA, 238 bp, Artificial Sequence
  Description of Artificial Sequence: Synthetic polynucleotide
gggaagagaggcactacacggcggctatataaggcccccttacctataggccttttacggttagggtgacttccccacaacacatagcgacatgcaaatttagatgggcgtgcctcccctgtccctgtgggcaacttctctccgggacacgcgcgctccgcgctgagtgttcccgccttttgacttccagccgagcgaatcctgggagagggcagatgacgtccaacagtcaggctcc

SEQ ID NO: 1212 - DNA, 233 bp, Artificial Sequence
  Description of Artificial Sequence: Synthetic polynucleotide
gggagaagggggagtacacggcggatatataaggcccccttatgtatagtccttttacggttagggtgacttcccacaacgcatagcgacatgcaaatttgacgggcgtgcctcctctgtccctgcgggcaacttctctcctggacgcgcgctccgcgctgcgtgttcccgccttttgactccagccgagcgaatcctgggagagggcaggtgacgtccaacagtcaggctcg

SEQ ID NO: 1213 - DNA, 232 bp, Artificial Sequence
  Description of Artificial Sequence: Synthetic polynucleotide
gagagaggctgtgcacacggcggatatataaggcccccttatgtataatcctttaccggttagggtgacttcccacaacgcatagcgacatgcaaatttgacgggcgtgcctcctctgtccctgcgggcaacttctctcctggacgcgcgctccgcgctgcgtgttcccgccttttgactccagccgagcgaatcctgggagagggcaggtgacgtccaacagtcaggctcg

SEQ ID NO: 1214 - DNA, 231 bp, Artificial Sequence
  Description of Artificial Sequence: Synthetic polynucleotide
gggagaagggggagtacacggcggatatataaggcccccttatgtatagtccttttacggttagggtgacttcccacaacgcatagcgacatgcaaatttgacgggcgtgcctcctctgtccctgcgggcaacttctctcctggacgcgcgctcgcgctgcgtgttcccgccttttgactccagccgagcgaatcctgggagagggcaggtgacgtcaacagtcaggctcg

SEQ ID NO: 1215 - DNA, 240 bp, Artificial Sequence
  Description of Artificial Sequence: Synthetic polynucleotide
gggaagagaggcactacacggcggctatataaggcccccttacctataggccttttacggttagggtgacttccccacaacacatagcgacatgcaaatttagatgggcgtgcctcccctgtcccttgtgggcaacttctctccgggacacgcgcgctccgcgctgagtgttcccgccttttgacttccagccgagcgaatcctgggagagggcaggatgacgtccaacagtcaggctcc

SEQ ID NO: 1216 - DNA, 215 bp, Artificial Sequence
  Description of Artificial Sequence: Synthetic polynucleotide
tagaaaaaatcgtagtttatgctggatttataagattcccacatctaaagccatttcacagttacggtgaacttcccactacacacggcgatatgcaaatatagcggaagtgttcctgaggcgtggtaaagcgcgcgcgcgctgagagttcccgccctgtggtgctgggctggagatgcctgagaactggctgatgacggcaacgttcgggctcc

SEQ ID NO: 1217 - DNA, 214 bp, Artificial Sequence
  Description of Artificial Sequence: Synthetic polynucleotide
tagaaaaaatcgtgcctatgctggatttataagattcccacatctaaagccatttctcagttacggtgaacttcccactacacacggcgatatgcaaatatagcggaagtgttcctgaggcgtggtaaagcgcgcgcgcgctgagagttcccgccctgtggtgctgggctggagatgcctgagaactggctgatgacggcaacgttcgggctcc

SEQ ID NO: 1218 - DNA, 214 bp, Artificial Sequence
  Description of Artificial Sequence: Synthetic polynucleotide
tagaaaaaatcgtgcctacgctggatttataagattcccacatctaaagccatttctcagttacggtgaacttcccactacacacggcgatatgcaaatatagcggaagtgttcctgaggcgtggtaaagcgcgcgcgcgctgagagttcccgccctgtggtgctgggctggagatgcctgagaactggctgatgacggcaacgttcgggctcc

SEQ ID NO: 1219 - DNA, 215 bp, Artificial Sequence
  Description of Artificial Sequence: Synthetic polynucleotide
tagaaaaaatggtagtttatgcgggatttataagactcccacatctaaagccatttcacagttacggtgacttccccacaacacacggcgatatgcaaatatagcggaagtgttcctgaggcgtggtaaagcgcacgcgcgctgagagttcccgccctgtggtgctgggcccgagatgcctgagagcgggctgatgacggcagcgtttgggctcc

SEQ ID NO: 1220 - DNA, 215 bp, Artificial Sequence
  Description of Artificial Sequence: Synthetic polynucleotide
tagaaaaaaggggagtttatgcgggatttataagactcccatatctaaagacatttcacagttatggtgacttccccacaacacatggcgatatgcaaatatcgcggagctggccctgaggcgtggtaaggcgcacgcgcgctgagagttcccgccctgtggcgctgggcccgagattcctgagagcgggttgatgacggcagcgtttgggctcc

SEQ ID NO: 1221 - DNA, 213 bp, Artificial Sequence
  Description of Artificial Sequence: Synthetic polynucleotide
tagagaaaagggggtgtttgcgggatttataagattcccattgctaaagacatttcacagttatggtgacttcccacaacacttggcgatatgcaaatatcacggagttggccctgaggcgcggcgagacgcacgcgcgctgagagttcccgccttctcaccctgggtccaaggttcctgaaggcgggttgaagactgcagtgtttgggcgcc

SEQ ID NO: 1222 - DNA, 215 bp, Artificial Sequence
  Description of Artificial Sequence: Synthetic polynucleotide
taggaaaaaggggggtttatgcaggatttataagactcccatatctaaagacatttcacggttatggtgacttccccacaacacatagcgatatgcaaatatcgcggagcgggccctgaggcgtggtcaggcgcacgcgcgctgcgagttcccgccctgtggcgctgggcccgagattcctgagagcgggttgatgacgtcagcgtttgggctcc

SEQ ID NO: 1223 - DNA, 212 bp, Artificial Sequence
  Description of Artificial Sequence: Synthetic polynucleotide
taggaaacgcgcattttaggcaggatttataagacacccatatctaaagacatttcacggttatggtgacttcccacaacacatagcgaaatgcaaatatgtggagcaggcgctgaggcgtggtcgggcgcacgcgcgctgcgagttcccgcccttcggcgctaggcccgagatgcctgagagctggttgatcacgtctgcgtttggactca

SEQ ID NO: 1224 - DNA, 212 bp, Artificial Sequence
  Description of Artificial Sequence: Synthetic polynucleotide
taggaaaagagcattttaggcaggatttataagacacccatatctaaagacatttcacggttatggtgacttcccacaacacatagcgaaatgcaaatatgtggagcgggcgctgaggcgtggtcgggcgcacgcgcgctgcgagttcccgcccttcggcgctaggcccgagattcctgagagctggttgatgacgtcagcgtttggactcc

SEQ ID NO: 1225 - DNA, 269 bp, Artificial Sequence
  Description of Artificial Sequence: Synthetic polynucleotide
tgggaaaaagaggggcttcacgcagcatttataaggctcccatatctaaagacatttcacggttagggtgacttcccccacaatacatagcgacatgcaaatatcatggtccttcagcggggcgtgcctccccctgtcccttggcccgtgggcatcttctcgccaggacacgcacgcggcgcgctgcgtgttcccgccttgtgacttctaggcgggcgagtccctgggagagggttggatgacgtcagcatcgccaacattcgggctcc

SEQ ID NO: 1226 - DNA, 233 bp, Artificial Sequence
  Description of Artificial Sequence: Synthetic polynucleotide
cgggaaaaagacgggcctcacgccgcatttataaggctcccatatctaacgacattttacggttagggtgacttcccacaatacatagcgatatgcaaatatagcggggcgtgtctccccctggcccttggctcgtgggcatcgtctcgccaggacgcatgcgcgctgcttgttcccgccttgactacttgctagtcctgggagagggttgatgacgtcaacgttcagactcc

SEQ ID NO: 1227 - DNA, 233 bp, Artificial Sequence
  Description of Artificial Sequence: Synthetic polynucleotide
ccggcataagacgggcctcacggcgcacttataaggatcccatatctaacgacattttacggttagggtgacttcccacaatacatagcgatatgcaaatatagcggggcgtgtctactcctggcccttggtttgtgggcgtcgtctcgccaggacgcatgcgcactgcttgttcccgccttgactacttgctagtcctgggagagggttgatgacgtcaacgttcagactcc

SEQ ID NO: 1228 - DNA, 233 bp, Artificial Sequence
  Description of Artificial Sequence: Synthetic polynucleotide
tcagcgtaaaggagtgcgtacaaagaatttataaggctcgcatagctctagctgcttcacagttagggtgacttcccacaagccatagcgcatgtaaatataagggcgtttgttcccccgcccccgtccaggctgcagcatctctccaggacgcaggcgcactgagccttcccgcccggtcactccagacccgccattcccgggccaggttaatgacgtcacacttaagctcc

SEQ ID NO: 1229 - DNA, 247 bp, Artificial Sequence
  Description of Artificial Sequence: Synthetic polynucleotide
tcagcgtaaagggatgcttacgtagaatttataaggctcccatacctaaagccatttcacggttagggtgacttcccacaagacatagcgacatgcaaatatagaggggcgtgcttcccctgtcccgtcccgtaggcgtcttctcgccagggacgcacgcgcgctgcgccctgttcccgccctgtcactagggattctgggccggccattccccgggcgcaggttgatgacgtcacgtttgggctcc

SEQ ID NO: 1230 - DNA, 239 bp, Artificial Sequence
  Description of Artificial Sequence: Synthetic polynucleotide
tcagcgtaaaagaatgcttagctagaatttataaggctcccagacctaaagccatatctcggttagggtgacttcccacaagacatagcgacatgcaaatatagaggggcgggcttcccctgtgccttgtaggcgtcttctcacgaagtcgcaagcgcgttgcgccctgttcccgccctgtcactattgattattggccgacctttcctcgggcggagtctgatgacgtcatcggttcc

SEQ ID NO: 1231 - DNA, 241 bp, Artificial Sequence
  Description of Artificial Sequence: Synthetic polynucleotide
tcagcgtaaaggaatgcttacctagaatttataaggctcccagacctaaagccatatcacggttagggtgacttcccacaagacatagcgacatgcaaatatagaggggcgggcttcccctgtgccttgtaggcgtcttctcacgaaggacgcacgcgcgctgcgccctgttcccgccctgtcactattgattattggccgaccattccccgggcgcagtctgatgacgtcattcggttcc

SEQ ID NO: 1232 - DNA, 212 bp, Artificial Sequence
  Description of Artificial Sequence: Synthetic polynucleotide
tgggggaagctgggctcgatcagcctttataaagctccaaaaactcaagacatttttccgttacggtggcttcccacagtacacagcgacatgcaaatagcttgccaatgaattcgcggaccgcttcccgccccggcgcaggcgcgcggacgctgtctcccctggacgcgcgctcgcggttcccgggagctggctgatgacgttcggtctcc

SEQ ID NO: 1233 - DNA, 225 bp, Artificial Sequence
  Description of Artificial Sequence: Synthetic polynucleotide
tggggaaaggtgggctcaagcagactttataaagctccaaaaactcaagacatttttccgttacggtggcttcccacaatacacagcgacatgcaaatatagtggagtgtgcttgccaatgatttcccgggccgcttctcgccacggcgcaggcgcgctgtgtgttcccgccctggacgggcgcgcccgcggttcccgggagcgggttgatgacgttcggtctcc

SEQ ID NO: 1234 - DNA, 213 bp, Artificial Sequence
  Description of Artificial Sequence: Synthetic polynucleotide
tggggagtggtggatccaagcagactttataaagctccgaaggtccaaggcatctttcccttacggtggcttcccacaagacatagcgatatgcaaatttatcgatacgtgcttcagacgcgcttctcgccgcagcgcaagcgcgctgtgtgctgacgcgggggacgggccagtgcgcgattcccgggagcgggttgatgacgttcgatctcc

SEQ ID NO: 1235 - DNA, 212 bp, Artificial Sequence
  Description of Artificial Sequence: Synthetic polynucleotide
tggggagaggtggatccgaacagactttataaagctccgaaagcccaaggcatctttcccttacggtagcttcccacaagacatagcgacatgcaaatttcttgaagtatgcttcagacgcgcttctcgccacagcgcaagcgcgctgtgtgctgacgcgggaacgggccagtgcgcggttcccgggagcgggttgatgacgttagatctcc

SEQ ID NO: 1236 - DNA, 213 bp, Artificial Sequence
  Description of Artificial Sequence: Synthetic polynucleotide
tggggagaggtggatccaaacagactttataaagctccgaaagcccaaggcatctttcccttacggtggcttcccacaagacatagcgacatgcaaatttattgaagtatgcttcagacgcgcttctcgccgcagcgcaagcgcgctgtgtgctgacgcgggagacgggccagtgcgcggttcccgggagcgggttgatgacgttcgatctcc

SEQ ID NO: 1237 - DNA, 176 bp, Artificial Sequence
  Description of Artificial Sequence: Synthetic polynucleotide
ttcagggtgtagaccggccgccactataaggctcgaaagaggaataaatttttcgtttagggtgatttcccacaaagcacagcgcgtaatttgcatgtgctctaccccaggctcctgtgctagacaagaagcccgcgcatccgggcaagggatgatgacgtcgtccttcaagagcg

SEQ ID NO: 1238 - DNA, 176 bp, Artificial Sequence
  Description of Artificial Sequence: Synthetic polynucleotide
ttcagggtgtagaccggccgccactataaggctcgaaagaggaataaatttttcgtttagggtgatttcccacaaagcacagcgcgtaatttgcatgtgctctatcccaggctcctgtgccagacaagaagcccgcgcatccgggcaagggatgatgacgtcgtccttcaagagcg

SEQ ID NO: 1239 - DNA, 176 bp, Artificial Sequence
  Description of Artificial Sequence: Synthetic polynucleotide
ttcagtgtgtagaccggccgccactataaggttcgaaagaggaataaatttttcgtttagggtgatttcccacaaagcacagcgcgtaatttgcatgtgctctaccccaggctcctgtgctagacaagaagcccgcgcatccgggcaagggatgatgacgtcgtccttcaagagcg

SEQ ID NO: 1240 - DNA, 183 bp, Artificial Sequence
  Description of Artificial Sequence: Synthetic polynucleotide
tggagggtgtagaccggccgccactataaggctcgaaagaggaataaatttttcgcttacggtgacttcccacaaagcacagcgcgtaatttgcatgtgctctatcccaggcttcctgttccagacaagaagcccgcgcatccgggcaagggatgatgacgtcatccccgtccttcaagcgcg

SEQ ID NO: 1241 - DNA, 176 bp, Artificial Sequence
  Description of Artificial Sequence: Synthetic polynucleotide
tggaaggtggagacctgccgccataataagactccaaaagagagtgaatttaacacttacggtgacttcccacaaagcacagcgtgtaatttgcatgcgctctagcccaggctccagctccggacgagaagcccgcgcatcccggcaaaggatgatgacgtcgtccttcaagcgct

SEQ ID NO: 1242 - DNA, 183 bp, Artificial Sequence
  Description of Artificial Sequence: Synthetic polynucleotide
tggagggtggagaccggccaccattataagactccaaagcggaataaattttacgcttatggtgacttcccacaaagcacagcgcgtaatttgcatgtgctctatcccaggcttcctgctccagacaagaagcccgcgcatccgggcaagggatgatgacgtcatccccgtccttcaagcgcg

SEQ ID NO: 1243 - DNA, 183 bp, Artificial Sequence
  Description of Artificial Sequence: Synthetic polynucleotide
tggagggtggagaccggccaccattataagactccaaagcggaataaattttacgcttatggtgacttcccacaaagcacagcgcgtaatttgcatgtgctctatcccaggcttcctgctccagacaagaagcccgcgcatccgggcaagggatgatgacgtcatccccgtccctcaagcgcg

SEQ ID NO: 1244 - DNA, 183 bp, Artificial Sequence
  Description of Artificial Sequence: Synthetic polynucleotide
tggagggtggagaccggccaccattataagactcgaaagcggaataaattttacgcttatggtgacttcccacaaagcacagcgcgtaatttgcatgtgctctatcccaggcttcctgctccagacaagaagcccgcgcatccgggcaagggatgatgacgtcatccccgtccttcaagcgcg

SEQ ID NO: 1245 - DNA, 176 bp, Artificial Sequence
  Description of Artificial Sequence: Synthetic polynucleotide
tacagggtggagatcggcgaaaattataagactcgaaagcggcataaagtttaagcttatggtgacttcccacaaagcacagcgcgtaatttgcatgtgctttatcccaggctctttctccagaccagtagcctgcacatccgggcaaggggtgatgacgtcgtccatcaagcgcg

SEQ ID NO: 1246 - DNA, 183 bp, Artificial Sequence
  Description of Artificial Sequence: Synthetic polynucleotide
gggaaggtggagaccggccaccattataagactccaaagcggaatacatttttcggttatggtgacttcccacaaagcacagcgcgtaatttgcatgcgctctatcccaggcttcctgctccagacaagaagcccgcgcatccgggcaagggatgatgacgtcatccccgtccctcaagcgcg

SEQ ID NO: 1247 - DNA, 180 bp, Artificial Sequence
  Description of Artificial Sequence: Synthetic polynucleotide
acggcggtgtggagggcgaactttataagcctccgaagagaaagcgatttttcagttatggtggtttcccacaaggcacagcgcacagtttatttgcatgcgctctagccccggctcccgctccagactaagaagcccgcgcatttcggctgcggatgatgacgtcgggcctcaagcgcc

SEQ ID NO: 1248 - DNA, 190 bp, Artificial Sequence
  Description of Artificial Sequence: Synthetic polynucleotide
acggcggtgtggagggcgaactttataagcctccgaagagaaagcgatttttcagttatggtggtttcccacaaggcacagcgcacagtttatttgcatgcgctcccgccgcttctagccccggctcccgctccagactaagaagcccgcgcatttcggctgcggatgatgacgtcgggcctcaagcgcc

SEQ ID NO: 1249 - DNA, 203 bp, Artificial Sequence
  Description of Artificial Sequence: Synthetic polynucleotide
ggggaggtgtgggccggccagctttataagactccaaagcggaatgcatttttcagttatggtggcttcccacaaggcacagcgcgctgcttatttgcatgggctcacgccgcttctagcccgggcttcctgctccagactaagaagcccgcgcatcccggccgggcgagggatgatgacgtcatccccagccctcaagcgcg

SEQ ID NO: 1250 - DNA, 188 bp, Artificial Sequence
  Description of Artificial Sequence: Synthetic polynucleotide
ggagggcggtggccggcgagcttaataagcctcggaggcgggacgcctgttacagtgacggtggtttcccacaaagcacggcgcggcggtcttgatttgcatgcgcctttatgcccgcctcccgctccggagaagaagcccgcgcatcccggctgggctgggggtgatgacgtcagggctcgagcgcc

SEQ ID NO: 1251 - DNA, 188 bp, Artificial Sequence
  Description of Artificial Sequence: Synthetic polynucleotide
ggagagcggtggccggcgagcttaataagcctcggaagcggaacgcattttacagtgatggtggtttcccacaaggcacagcgcggcggcctttatttgcatgcgcttctattcccgcctcccgctccagagaagaagcccgcgcatcccggctcggctggggatgatgacgtcagggctcgagcgcc

SEQ ID NO: 1252 - DNA, 185 bp, Artificial Sequence
  Description of Artificial Sequence: Synthetic polynucleotide
ggggtggtgtggctggcgagcttaataaggctccgaagcggaatgcattttacagtgatggtggtttcccacaaggcacagcgcggcgtttatttgcatgcgcttctattcccgcctcccgctccagacaagaagcccgcgcatcccggctcggctggggatgatgacgtcagggctcgagcgcc

SEQ ID NO: 1253 - DNA, 185 bp, Artificial Sequence
  Description of Artificial Sequence: Synthetic polynucleotide
ggagaggggtggccggcgagcttaataagcctccgaagcggaacgcattttacagtgatggtggtttcccacaaggcacagcgcggcgtttatttgcatgcgcttctattcccgcctcccgctccagagaagaagcccgcgcatcccggctcggctggggatgatgacgtcagggctcgagcgcc

SEQ ID NO: 1254 - DNA, 195 bp, Artificial Sequence
  Description of Artificial Sequence: Synthetic polynucleotide
ggggtggtgtgggtggcgagctttataaggctccgaagcggaatgcatttttcagttatggtggtttcccacaaggcacagcgcgccgtttatttgcatgggctcccgccgcttctagccccggctcccgctccagactaagaagcccgcgcatcccggcccggctggggatgatgacgtcaggcctcaagcgcc

SEQ ID NO: 1255 - DNA, 195 bp, Artificial Sequence
  Description of Artificial Sequence: Synthetic polynucleotide
ggggaggtgtgggcggcgagctttataagactccaaagcggaatgcatttttcagttatggtggtttcccacaaggcacagcgcgctgcttatttgcatgggctcacgccgcttctagcccgggctcccgctccagactaagaagcccgcgcatcccggccgggcaggggatgatgacgtcagccctcaagcgcg

SEQ ID NO: 1256 - DNA, 188 bp, Artificial Sequence
  Description of Artificial Sequence: Synthetic polynucleotide
gcaaagcggtggccggcgagcttaataagcctcggaggcgggacgcctgttacagtgacggtggtttcccacaaagcacggcgcggcggtcttgatttgcatgcgcctttatgcccgcctcccgctccggagaagaagcccgcgcatcccggctgggctgggggtgatgacgtcagggctcgagcgcc

SEQ ID NO: 1257 - DNA, 204 bp, Artificial Sequence
  Description of Artificial Sequence: Synthetic polynucleotide
ggggaggtgtgggccggccagctttataagactccaaagcggaatgcatttttcagttatggtggcttcccacaaggcacagcgcgctgcttatttgcatgggctcacgccgcttctagcccgggcttcctgctccagactaaagaagcccgcgcatcccggccgggcgagggatgatgacgtcatccccagccctcaagcgcg

SEQ ID NO: 1258 - DNA, 176 bp, Artificial Sequence
  Description of Artificial Sequence: Synthetic polynucleotide
ggcgaggggtgggcagccacctttataagactccagagccgaatgcatttctcagttgtggtggcttcccatgaggcacagcgcgctatttgcatgcgctctagcccgggctccggctctggaataaaaaatcccgcgcatccgggtgagggatgacgacgtcaccctcaagcgct

SEQ ID NO: 1259 - DNA, 203 bp, Artificial Sequence
  Description of Artificial Sequence: Synthetic polynucleotide
ggggaagtgggggcaggccggctttataagactccagagcggaacgcatttttcagttatggtggcttcccacaaggcacagcgctatgcttatttgcatgggctcacgccgcttctagcccgggccccctgctccagacaaaaaagcccgcgcatcccggccgggcgcgggatgatgacgtcatccccagccctcgagcgcg

SEQ ID NO: 1260 - DNA, 170 bp, Artificial Sequence
  Description of Artificial Sequence: Synthetic polynucleotide
gaagaagtgggggagaccggctttataagactcagaagggaacaaacttttcagttgcggtggcttcccacaaggcacagcgctttatttgcatgcgcgctaaccggggccccctactaaaaagcccgcgcatgcccggcgcgggatgatgacgtcagccctcgagcgcg

SEQ ID NO: 1261 - DNA, 170 bp, Artificial Sequence
  Description of Artificial Sequence: Synthetic polynucleotide
gaagtcgtgggggagagcggctttataagactcagaagggaacaaacttttcagttgcggtggcttcccacaaggcacagcgctttatttgcatgcgcgctaaccggggccccctactaaaaagcccgcgcatgtccggcgcgggatgatgacgtcagcccccgagcgcg

SEQ ID NO: 1262 - DNA, 221 bp, Artificial Sequence
  Description of Artificial Sequence: Synthetic polynucleotide
ggggaagtgggggcaggccggctttataagactccagagcggaacgcatttttcagttatggtggcttcccacaaggcacagcgctatgcttatttccatggccccacctcagcatggaagctcacgccgcttctagcccgggccccctgctccagacaaaaaagcccgcgcatcccggccgggcgcgggatgatgacgtcatccccagccctcgagcgcg

SEQ ID NO: 1263 - DNA, 201 bp, Artificial Sequence
  Description of Artificial Sequence: Synthetic polynucleotide
gggaaggcggggccggcggcgctaaaaggctccggggcggcccggacttatcagttacggtggcttcccacgaggcgcagcgccgctcatttgcatggccccaccccagacgggaagcccgcgccgctcatttgcgtggccccgccccagacgggaagcccgcgctgctcggccgcggtggtgacgtcggcctctcgcgcc

SEQ ID NO: 1264 - DNA, 201 bp, Artificial Sequence
  Description of Artificial Sequence: Synthetic polynucleotide
gggaaagcggggccggcggcgctaaaagactccagggcggcccggacttatcagttacggtggcttcccacgaggcgcagcgccgctcatttgcatggccccaccccagaagggaagcccgcgccgctcatttgcgtggccccgccccagacgggaagcccgcgctgcccggccgcggtggtgacgtcggcctctcgcgcc

SEQ ID NO: 1265 - DNA, 200 bp, Artificial Sequence
  Description of Artificial Sequence: Synthetic polynucleotide
gggaaggcggggccggcggcgctaaaaggctccggggccgcccggacttcacagttacggtggcttcccacgaggcgcagcgctgtcatttgcatggccccgccccagacgggaagcccgcgctgctcatttgcgtggccccgccccagacgggaagcccgcgctgctcggccgcggtggtgacgtcggcctctcgcgcc

SEQ ID NO: 1266 - DNA, 223 bp, Artificial Sequence
  Description of Artificial Sequence: Synthetic polynucleotide
tgaaaggggctcatcacaagcagagtttataaggctcccatgtgtacagccatttctcggtcatggtaactacccacaacacacagcgatatgcaaatatagcagagagtgtcttcccgcgcgcgcctggtcgtcttcgcgccggcgcgctgcgtggagcggaactatgacagagaccctgcgattcctgggagctggctgatgacgtcagtgtctaacctcc

SEQ ID NO: 1267 - DNA, 223 bp, Artificial Sequence
  Description of Artificial Sequence: Synthetic polynucleotide
tgaaaggaactcatcacaagcagagtttataaggctcccatgtgtacagccatttctcggtcatggtaactacccacaacacacagcgatatgcaaatatagcagagagtgtcttcccgcgcgcgcctggtcgtcttcgcgccggcgcgctgcgtggagcggaactatgacagagaccctgcgattcctgggagctggctgatgacgtcagtgtctaacctcc

SEQ ID NO: 1268 - DNA, 223 bp, Artificial Sequence
  Description of Artificial Sequence: Synthetic polynucleotide
tgaaaggaactcatcacaagcagagtttataaggctcccatgtgtacagccatttctcggtcatggtaactacccacaacacacagcgatatgcaaatatagcagagagtgtcttcccgcgcgcgcctggtcgtcttcgcgccggcgcgctgcgtggagcggaactgtgacagagaccctgcgattcctgggagctggctgatgacgtcagtgtctaacctcc

SEQ ID NO: 1269 - DNA, 223 bp, Artificial Sequence
  Description of Artificial Sequence: Synthetic polynucleotide
tgaaaggaactcatctcaagcagagtttataaggctcccatgtgtacagccatttctcggtcatggtaactacccacaacacacagcgatatgcaaatatagcagagagtgtcttcccgcgcgcgcctggtcgtcttcgcgccggcgcgctgcgtggagcggaactgtgacagagaccctgcgattcctgggagctggctgatgacgtcagtgtctaacctcc

SEQ ID NO: 1270 - DNA, 231 bp, Artificial Sequence
  Description of Artificial Sequence: Synthetic polynucleotide
tgagagaaaataagctcaagcagaacttataaggctcccaaatgtacagacatttctcggtcatggtaactacccacaacacacagcgatatgcaaatatagcagagtgtgcctccccgctcccgtccggtcgtcttctcgccggagcgcaggcgcgctgcgtggtgcgggactgtgaccctgagcctgcgattcctgggagcgggctgatgacgtcagcgtctgacctcc

SEQ ID NO: 1271 - DNA, 231 bp, Artificial Sequence
  Description of Artificial Sequence: Synthetic polynucleotide
tgagagaaactaatctcaagcagaacttataaggctcccatatgtacagacatttctcggtcatggtaactacccacaacacacagcgatatgcaaatatagcagagtgtgcctccccgctcgcgtccggtcgtcttctcgccggagcgcaggcgcgctgcgtggtgcgggactgtgaccctgagcctgcgattcctgggagcgggctgatgacgtcagcgtctaacctcc

SEQ ID NO: 1272 - DNA, 231 bp, Artificial Sequence
  Description of Artificial Sequence: Synthetic polynucleotide
tgagagaaagtaagctgaagcagaacttataaggctcccaaatctacagacatttctcggtcatggtgactacccacaacacacagcgatatgcaaatatcgcggggtgtgcctccctgctctcgtccggtcgtcttctcgccagggcgcaggcgcgctgcgtggtccgggcctgtgaccctgagcccgcgattcctgggagcgggttgatgacgtcagcgtttgacctcc

SEQ ID NO: 1273 - DNA, 247 bp, Artificial Sequence
  Description of Artificial Sequence: Synthetic polynucleotide
tgggagaaagtgggctgaagcagaacttataaggctcccaaatctaaagacatttttcggtcatggtgacttcccacaacacacagcgatatgcaaatatcgcggggtgtgcgcctccctgctctcgtccagtcgtcttctcgccagggcgcacgcgtactagcgcgctgcgttgttcccggcctgtgacagagcctgagcccgcgatttcctgggagcgggttgatgacgtcagcgtttgaactcc

SEQ ID NO: 1274 - DNA, 233 bp, Artificial Sequence
  Description of Artificial Sequence: Synthetic polynucleotide
tgggagaaagtgggctgaagcagaacttataaggctcccaaatctaaagacatttttcggtcatggtgacttcccacaacacacagcgatatgcaaatatcgcggggtgtgcgcctccctgctctcgtccagtcgtcttctcgccagggcgcacgcgcgctgcgtgttcccggcctgtgaccctgagcccgcgattcctgggagcgggttgatgacgtcagcgtttgaactcc

SEQ ID NO: 1275 - DNA, 223 bp, Artificial Sequence
  Description of Artificial Sequence: Synthetic polynucleotide
tgaaagggactcctctcaagcagagtttataaggctcccatgtgtacagccatttctcggtcatggtaactacccacaacacacagcgatatgcaaatatagcagagagtgtcttcccgcgcgcgcctggtcgtctcggcgccggcgcgctgcgtggggcggaactgtgacagagaccctgcgattcctgggagctggctgatgacgtcagtgtctaacctcc

SEQ ID NO: 1276 - DNA, 223 bp, Artificial Sequence
  Description of Artificial Sequence: Synthetic polynucleotide
tgaaagggactcctctcaagcagagtttataaggctcccatgtgtacagccatttctcggtcatggtaactacccacaacacacagcgatatgcaaatatagcagagagtgtcttcccgcgcgcgcctggtcgtctcggcgccggcgcgctgcgtggggcggaactgtgacagagaccctgcgattcctgggagctggctgatgacatcagtgtctaacctcc

SEQ ID NO: 1277 - DNA, 229 bp, Artificial Sequence
  Description of Artificial Sequence: Synthetic polynucleotide
tgagggaagataagctcaagcagaacttataaggctcccaaatgtacagacatttatcggtcatggtaactacccacaacacacagcgatatgcaaatatagcagagcgtgcctcctgcacgggccggtcgtcttctcgccggagcgcaggcgcgctgcgtggtgcgggactgtgaccctgagcctgcgattcctgggagcgggctgatgacgtcagcgtctgagctcc

SEQ ID NO: 1278 - DNA, 233 bp, Artificial Sequence
  Description of Artificial Sequence: Synthetic polynucleotide
tgggagaaagtgggctgaagcaggacttataaggctcccaaatctaaagacattttttggtcatggtgacttcccacaacacacagcgtcatgcaaatatcatggggtgtgcgcctccctgctcccgtccagtcgtcttctcgccagggcgcacgcgcgctgcgtgttcccggcctgtgaccctgagcccgcgattgctgggagcgagttgatgacgtcagcgtttgaactcc

SEQ ID NO: 1279 - DNA, 235 bp, Artificial Sequence
  Description of Artificial Sequence: Synthetic polynucleotide
tggggaaagctgggctcaagcagagcttataaggctctcgtacctaaagacatttcacggtcatggtgactacccacaacacacagcgacatgcaaatttcgtggagtgtgcctccctccgcttgtcccgcgtcttttctctcccgggcgcacgcgcgcacgcacgcgacgcgttcccgccacagcgcccccgcggttcctgggagcgggttgatgacgtcagcatttggacgcc

SEQ ID NO: 1280 - DNA, 214 bp, Artificial Sequence
  Description of Artificial Sequence: Synthetic polynucleotide
tgaaagaaactagccacaaacggaaactataagaggtccaaagctcagtgtactctatggttagggtgacttcccacaatacatagcgatatgcagatttcttccccaatctggcccgccgggccctccctagagcgcatgcgctgcaggtccacggcagagcactgggcgggcgatcccgggagcgggttgatgacgtcagcgtttgaactcc

SEQ ID NO: 1281 - DNA, 214 bp, Artificial Sequence
  Description of Artificial Sequence: Synthetic polynucleotide
tgaaagaaactagccacaaacggaaactataagaggtccaaagctcagtgtactctatggttagggtgacttcccacaatacatagcgatatgcagatttcttccccagtctggcccgctgggccctccctagagcgcatgcgctgcaggtccacggcagagcactgggcgggcgatcccgggagcgggttgatgacgtcagcgtttgaactcc

SEQ ID NO: 1282 - DNA, 216 bp, Artificial Sequence
  Description of Artificial Sequence: Synthetic polynucleotide
tgaaagaaactagttacaaacggaaactataagaggtccaaagctcagtgtactttatggtcagggtgacttcccacaatacatagcgatatgtagatttcttccccgatctgggcccgccgggtcctccctagagcgcatgcgctgcaggtccacggcagaggactgggcgggcgattcccgggagcgggttgatgacgtcagcgtttgaactcc

SEQ ID NO: 1283 - DNA, 245 bp, Artificial Sequence
  Description of Artificial Sequence: Synthetic polynucleotide
tgagagaaaatggtttgaagcagaacttataagaatcccaaatctcagtatattttttggtcatggtgacttcccacaatacacagcgatatgtagatatcgcggggagcacctcccagttctggtccagtcggctcctcgctagggcgcacgcgtactagcgcgctgcatggttcccggcctgtgacagtgcctgagcccgcgatttcctgggagcgagttgatgacgtcagcgtttgaactcc

SEQ ID NO: 1284 - DNA, 217 bp, Artificial Sequence
  Description of Artificial Sequence: Synthetic polynucleotide
tgaaagaaactggtttcaaacggaaactataagaggtccaaatctcagtatactttttggtcagggtgacttcccacaatacacagcgatatgtagatttcctccccgatctggtcccgtcggctcctcgctagggcgcatgcgctgcaggtccccggcctatgactgggccggcgatttcccgggagcgagttgatgacgtcagcgtttgaactcc

SEQ ID NO: 1285 - DNA, 226 bp, Artificial Sequence
  Description of Artificial Sequence: Synthetic polynucleotide
tgaaaaaaaaggtttcaaagctacacttataaggctcccaaatgtcagtatattttttggtcacggtgacttcccacaatgcatagcgatatgtagatattgcgaggagtacctcccagttctggtcctgtcagctctttgctaggacgcacgcgctgcaggttcccagcctgtgattgggccagcgattccgggagcgaattgatgacgtcagcgtttgaactcc

SEQ ID NO: 1286 - DNA, 226 bp, Artificial Sequence
  Description of Artificial Sequence: Synthetic polynucleotide
tgaaaaaaaaggtttcaaagctacacttataaggctcccaaatctcagtatattttttggtcacggtgacttcccacaatgcatagcgatatgtagatattgcgaggagtacctcccagttctggtcctgtcagctctttgctaggacgcacgcgctgcaggttcccagcctgtgattgggccagcgattccgggagcgaattgatgacgtcagcgtttgaactcc

SEQ ID NO: 1287 - DNA, 226 bp, Artificial Sequence
  Description of Artificial Sequence: Synthetic polynucleotide
tgaaagaaaaggtttcaaagctacacttataaggatcccaaatctcagtatattttttggtcacggtgacttcccacaatacacagcgatatgtagatatcgcgaggagtacctcccagttctggtcctgtcagctctttgctagggcgcacgcgctgcaggttcacagcctgtgattgggcccgcgattccgggagcgaattgatgacgtcagcgtttgaactcc

SEQ ID NO: 1288 - DNA, 226 bp, Artificial Sequence
  Description of Artificial Sequence: Synthetic polynucleotide
tgaaagaaaaggtttcaaagctacacttataaggatcccaaatctcagtatattttttggtcacggtgacttcccacaagacacagcgatatgtagatatcgcgaggagtacctcccagttctggtcctgtcagctctttgctagggcgcacgcgctgcaggttcacagcctgtgattgggcccgcgattccgggagcgaattgatgacgtcagcgtttgaactcc

SEQ ID NO: 1289 - DNA, 232 bp, Artificial Sequence
  Description of Artificial Sequence: Synthetic polynucleotide
tgaaagaaaaagttttgaagcagaacttataagaatcccaaatctcagtatattttttggtcatggtgacttcccacaatacacagcgatatgtagatatcgcgaggagcacctcccagttctggtcctgtcagctcctcgctagggcgcacgcgcgctgcatggttcacagcctgtgaccctgggcccgcgattcctgggagcgagttgatgacgtcagcgtttgaactcc

SEQ ID NO: 1290 - DNA, 232 bp, Artificial Sequence
  Description of Artificial Sequence: Synthetic polynucleotide
tgaaagcaaaagttttgaagcagaacttataagaagcccaaatctcagtatattttttggtcatggtgacttcccacaatacacagcgatatgtagatatcgcgaggagcacctcccagttctggtcctgtcagctcctcactagggcgcatgcgcgctgcatggttcacagcctgtgaccctgggcctgcgattcctgggagcgagttgatgacgtcagcgtttgaactcc

SEQ ID NO: 1291 - DNA, 227 bp, Artificial Sequence
  Description of Artificial Sequence: Synthetic polynucleotide
tgaaagcaaaagttttgaagcagaacttataagaagcccaaatctcagtatattttttggtcatggtgacttcccacaatacacagcgatatgtagatatcgcgaggagcacctcccagttctggtcctgtcagctcctcactagggcgcatgcgctgcaggttcacagcctgtgactgggcctgcgattcctgggagcgagttgatgacgtcagcgtttgaactcc

SEQ ID NO: 1292 - DNA, 244 bp, Artificial Sequence
  Description of Artificial Sequence: Synthetic polynucleotide
tgagagaaaatgttttgaagcagaacttataagaatcccaaatctcagtatattttttggtcatggtgacttcccacaatacacagcgatatgtagatatcgcggggagcacctcccagttctggtccagtcggctcctcgctagggcgcacgcgtactagcgcgctgcatggttcccggcctgtgacagtgcctgagcccgcgattcctgggagcgagttgatgacgtcagcgtttgaactcc

SEQ ID NO: 1293 - DNA, 243 bp, Artificial Sequence
  Description of Artificial Sequence: Synthetic polynucleotide
tgagagaaaatgttttgaagcagaacttataagaatcccaaatctcagtatattttttggtcatggtgacttcccacaatacacagcgatatgtagatatggtggggagcacctcccagttctggcccagtcggctcctcgctagggcgcacgcgtactagcgcgctgcgggttcccggcctgtgacagtgcctgagcccgcgattcctgggagcgagttgatgacgtcagcgtttgaactcc

SEQ ID NO: 1294 - DNA, 243 bp, Artificial Sequence
  Description of Artificial Sequence: Synthetic polynucleotide
taagagaaagttttttgaagcagaacttataaggatcccaaaactcagtatattttttggtcatggtgacttcccacaatacacagcgatatgtagatatggtggggagcacctcccagttctggcccagtcggctcctcgctagggcgcacgcgtactagcgcgctgcgggttcccggcctgtgacagtgcctgagcccgcgattcctgggagcgagttgatgacgtcagcgtttgaactcc

SEQ ID NO: 1295 - DNA, 244 bp, Artificial Sequence
  Description of Artificial Sequence: Synthetic polynucleotide
tgagagaaaatggtttgaagcagaacttataagaatcccaaatctcagtatattttttggtcatggtgacttcccacaatacacagcgatatgtagatatcgcggggagcacctcccagttctggtccagtcggctcctcgctagggcgcacgcgtactagcgcgctgcatggttcccggcctgtgacagtgcctgagcccgcgattcctgggagcgagttgatgacgtcagcgtttgaactcc

SEQ ID NO: 1296 - DNA, 232 bp, Artificial Sequence
  Description of Artificial Sequence: Synthetic polynucleotide
taagagaaagctttctgaaccagagcttataaagatcccaaaactcaggctatattttggtcatggtgacttcccacaatacacagcgatatgtagatatagtggggagcacctcccagttctggcccagtcgggtcctctctagggcgcacgcgcgctgcgggttcccggcctgtgacagtgcctgagcccgcgattcctgggagcgagttgacgtcaccgtttgaacttc

SEQ ID NO: 1297 - DNA, 233 bp, Artificial Sequence
  Description of Artificial Sequence: Synthetic polynucleotide
tgggagaaagtgggctgaagcagaacttataaggctcccaaatctaaagacatttttcggtcatggtgacttcccacaacacacagcgatatgcaaatatcatggggtgtgcgcctccctgctctcgtccagtcgtcttctcgccagggcgcacgcgcgctgcgtgttcccggcctgtgaccctgagcccgcgattgctgggagcgagttgatgacgtcagcgtttgaactcc

SEQ ID NO: 1298 - DNA, 250 bp, Artificial Sequence
  Description of Artificial Sequence: Synthetic polynucleotide
tgggaaaaagtggggctcaagcagaatttataaggctcccaaacctaaagacattttacggttatggtgacttcccacaacacacagcgacatgcaaatatcgcggggtgtgcggcctccctgctctcgtccaggcgtcttctcgccagggcgcacgcgcgcacgcgcgctgcgctgttcccgccctggtgacggagcctgagcccgcgatttcctgggagcgggttgatgacgtcagcgtttggactcc

SEQ ID NO: 1299 - DNA, 232 bp, Artificial Sequence
  Description of Artificial Sequence: Synthetic polynucleotide
caggaaagactgcgctgaggcagactttataaggctcccgcgcagaaagaaactttatagttatggtgatttcccacaagccactgcgtcatgcaaataaagcagggttgacggcttccaagtatgtaccttaaggtttttctctaggccgcgtacgctctgcgtattcagccacgtgaccctgagccagtggttgttgggagcacgttgtggacctctgcgtttggattcc

SEQ ID NO: 1300 - DNA, 236 bp, Artificial Sequence
  Description of Artificial Sequence: Synthetic polynucleotide
caggaaagagtggggctcaggcagactttataaggctcccaaacagaaagacactttacagttatggtgacttcccacaagacactgcgtcatgcaaatatcgcagggttggcggccttccttctatcttccttaaggtttctctctagggcgcgtacgcgctgcgtattcccgccccggtgaccctgagccagtggttgttgggagcacgttgatgacgtctgcgtttggattcc

SEQ ID NO: 1301 - DNA, 250 bp, Artificial Sequence
  Description of Artificial Sequence: Synthetic polynucleotide
tggggagtggccgcctagggggcgatatataaggctcacaaaacccgtgctatttcttacagagggtgaatatccccatgatcctcggcggcatgcaaataatagttgcgtcagagtagagcgcagcctgccggtctctcctagcgcgggaaatcctgttttcttcttcagtcccggtgacgaggacgcgcgcgcgcaccgtagccggacaacggtctggtaaggtaggcgggattcggttgagagcgcc

SEQ ID NO: 1302 - DNA, 250 bp, Artificial Sequence
  Description of Artificial Sequence: Synthetic polynucleotide
cgtggaatccccgcctagggggcgctatataaggctcaccaaacccgtgctatttcttacagagggtgaatatcccatgatccttggcggcatgcaaataacagcttgcgtcagagtagagcgcagcctaccagtctttcctagcgcgggaaatcccgttttcttctgaggtcgccggtgacgcgcgcgtgcgccgtagccagagaacggtccgggaaggtaggccggccgggattcggttgagagcgcc

SEQ ID NO: 1303 - DNA, 242 bp, Artificial Sequence
  Description of Artificial Sequence: Synthetic polynucleotide
tgggacaaaaaactcttggtcacattatataagaatcccatatctaaagacatttcagggttagggtgacttccccaacaatacatagcgacatgcaaatatcatggtccttccaggaggcgtgcctccccgtccccttggtccaggtcttgctggggcgcacgcgcgctgcgtgttcccgctctgtgactctcagctcgcgattcctgagagcggattggtgaagtcaatgttctggctcc

SEQ ID NO: 1304 - DNA, 231 bp, Galeopterus variegatus; identical to SEQ ID NO: 679

SEQ ID NO: 1305 - DNA, 231 bp, Galeopterus variegatus; identical to SEQ ID NO: 680

SEQ ID NO: 1306 - DNA, 242 bp, Ovis orientalis; identical to SEQ ID NO: 269

SEQ ID NO: 1307 - DNA, 242 bp, Ovis aries; identical to SEQ ID NO: 271

SEQ ID NO: 1308 - DNA, 242 bp, Ovis aries; identical to SEQ ID NO: 272

SEQ ID NO: 1309 - DNA, 241 bp, Ovis ammon; identical to SEQ ID NO: 273

SEQ ID NO: 1310 - DNA, 241 bp, Ovis aries; identical to SEQ ID NO: 275

SEQ ID NO: 1311 - DNA, 241 bp, Ovis aries; identical to SEQ ID NO: 276

SEQ ID NO: 1312 - DNA, 241 bp, Ovis nivicola; identical to SEQ ID NO: 277

SEQ ID NO: 1313 - DNA, 241 bp, Hemitragus hylocrius; identical to SEQ ID NO: 278

SEQ ID NO: 1314 - DNA, 241 bp, Ovis canadensis; identical to SEQ ID NO: 279

SEQ ID NO: 1315 - DNA, 242 bp, Capra aegagrus; identical to SEQ ID NO: 280

SEQ ID NO: 1316 - DNA, 242 bp, Capra hircus; identical to SEQ ID NO: 282

SEQ ID NO: 1317 - DNA, 242 bp, Capra aegagrus; identical to SEQ ID NO: 283

SEQ ID NO: 1318 - DNA, 242 bp, Pseudois nayaur; identical to SEQ ID NO: 284

SEQ ID NO: 1319 - DNA, 242 bp, Capra sibirica; identical to SEQ ID NO: 285

SEQ ID NO: 1320 - DNA, 242 bp, Capra hircus; identical to SEQ ID NO: 286

SEQ ID NO: 1321 - DNA, 242 bp, Capra hircus; identical to SEQ ID NO: 288

SEQ ID NO: 1322 - DNA, 242 bp, Ammotragus lervia; identical to SEQ ID NO: 289

SEQ ID NO: 1323 - DNA, 242 bp, Kobus ellipsiprymnus; identical to SEQ ID NO: 290

SEQ ID NO: 1324 - DNA, 242 bp, Redunca redunca; identical to SEQ ID NO: 291

SEQ ID NO: 1325 - DNA, 242 bp, Antidorcas marsupialis; identical to SEQ ID NO: 292

SEQ ID NO: 1326 - DNA, 242 bp, Litocranius walleri; identical to SEQ ID NO: 293

SEQ ID NO: 1327 - DNA, 241 bp, Madoqua kirkii; identical to SEQ ID NO: 294

SEQ ID NO: 1328 - DNA, 242 bp, Raphicerus campestris; identical to SEQ ID NO: 295

SEQ ID NO: 1329 - DNA, 242 bp, Oryx dammah; identical to SEQ ID NO: 296

SEQ ID NO: 1330 - DNA, 240 bp, Hippotragus niger; identical to SEQ ID NO: 299

SEQ ID NO: 1331 - DNA, 242 bp, Nanger granti; identical to SEQ ID NO: 300

SEQ ID NO: 1332 - DNA, 242 bp, Eudorcas thomsonii; identical to SEQ ID NO: 301

SEQ ID NO: 1333 - DNA, 241 bp, Kobus leche; identical to SEQ ID NO: 302

SEQ ID NO: 1334 - DNA, 241 bp, Oreamnos americanus; identical to SEQ ID NO: 303

SEQ ID NO: 1335 - DNA, 242 bp, Beatragus hunteri; identical to SEQ ID NO: 304

SEQ ID NO: 1336 - DNA, 242 bp, Damaliscus lunatus; identical to SEQ ID NO: 305

SEQ ID NO: 1337 - DNA, 242 bp, Damaliscus lunatus; identical to SEQ ID NO: 306

SEQ ID NO: 1338 - DNA, 242 bp, Connochaetes taurinus; identical to SEQ ID NO: 307

SEQ ID NO: 1339 - DNA, 242 bp, Aepyceros melampus; identical to SEQ ID NO: 308

SEQ ID NO: 1340 - DNA, 242 bp, Pantholops hodgsonii; identical to SEQ ID NO: 309

SEQ ID NO: 1341 - DNA, 242 bp, Neotragus moschatus; identical to SEQ ID NO: 310

SEQ ID NO: 1342 - DNA, 237 bp, Ourebia ourebi; identical to SEQ ID NO: 311

SEQ ID NO: 1343 - DNA, 242 bp, Saiga tatarica; identical to SEQ ID NO: 312

SEQ ID NO: 1344 - DNA, 242 bp, Bubalus bubalis; identical to SEQ ID NO: 313

SEQ ID NO: 1345 - DNA, 242 bp, Syncerus caffer; identical to SEQ ID NO: 318

SEQ ID NO: 1346 - DNA, 242 bp, Syncerus caffer; identical to SEQ ID NO: 319

SEQ ID NO: 1347 - DNA, 243 bp, Bos sp.; identical to SEQ ID NO: 321

SEQ ID NO: 1348 - DNA, 243 bp, Bos indicus; identical to SEQ ID NO: 326

SEQ ID NO: 1349 - DNA, 243 bp, Bos taurus; identical to SEQ ID NO: 327

SEQ ID NO: 1350 - DNA, 244 bp, Bos taurus; identical to SEQ ID NO: 334

SEQ ID NO: 1351 - DNA, 242 bp, Bos mutus; identical to SEQ ID NO: 335

SEQ ID NO: 1352 - DNA, 242 bp, Bos sp.; identical to SEQ ID NO: 336

SEQ ID NO: 1353 - DNA, 242 bp, Bos mutus; identical to SEQ ID NO: 337

SEQ ID NO: 1354 - DNA, 242 bp, Bison bison; identical to SEQ ID NO: 338

SEQ ID NO: 1355 - DNA, 242 bp, Bos frontalis; identical to SEQ ID NO: 339

SEQ ID NO: 1356 - DNA, 242 bp, Bos gaurus; identical to SEQ ID NO: 340

SEQ ID NO: 1357 - DNA, 241 bp, Tragelaphus scriptus; identical to SEQ ID NO: 341

SEQ ID NO: 1358 - DNA, 241 bp, Tragelaphus buxtoni; identical to SEQ ID NO: 342

SEQ ID NO: 1359 - DNA, 241 bp, Tragelaphus oryx; identical to SEQ ID NO: 343

SEQ ID NO: 1360 - DNA, 238 bp, Tragelaphus strepsiceros; identical to SEQ ID NO: 344

SEQ ID NO: 1361 - DNA, 241 bp, Cephalophus harveyi; identical to SEQ ID NO: 345

SEQ ID NO: 1362 - DNA, 241 bp, Tragelaphus imberbis; identical to SEQ ID NO: 346

SEQ ID NO: 1363 - DNA, 238 bp, Tragelaphus eurycerus; identical to SEQ ID NO: 347

SEQ ID NO: 1364 - DNA, 238 bp, Tragelaphus spekii; identical to SEQ ID NO: 348

SEQ ID NO: 1365 - DNA, 242 bp, Giraffa tippelskirchi; identical to SEQ ID NO: 349

SEQ ID NO: 1366 - DNA, 241 bp, Okapia johnstoni; identical to SEQ ID NO: 352

SEQ ID NO: 1367 - DNA, 241 bp, Sylvicapra grimmia; identical to SEQ ID NO: 353

SEQ ID NO: 1368 - DNA, 242 bp, Cephalophus harveyi; identical to SEQ ID NO: 354

SEQ ID NO: 1369 - DNA, 242 bp, Philantomba maxwellii; identical to SEQ ID NO: 355

SEQ ID NO: 1370 - DNA, 242 bp, Neotragus pygmaeus; identical to SEQ ID NO: 356

SEQ ID NO: 1371 - DNA, 242 bp, Capreolus capreolus; identical to SEQ ID NO: 357

SEQ ID NO: 1372 - DNA, 242 bp, Capreolus pygargus; identical to SEQ ID NO: 358

SEQ ID NO: 1373 - DNA, 242 bp, Hydropotes inermis; identical to SEQ ID NO: 359

SEQ ID NO: 1374 - DNA, 242 bp, Muntiacus crinifrons; identical to SEQ ID NO: 360

SEQ ID NO: 1375 - DNA, 242 bp, Muntiacus muntjak; identical to SEQ ID NO: 361

SEQ ID NO: 1376 - DNA, 242 bp, Muntiacus reevesi; identical to SEQ ID NO: 362

SEQ ID NO: 1377 - DNA, 242 bp, Muntiacus muntjak; identical to SEQ ID NO: 363

SEQ ID NO: 1378 - DNA, 242 bp, Muntiacus muntjak; identical to SEQ ID NO: 365

SEQ ID NO: 1379 - DNA, 242 bp, Muntiacus reevesi; identical to SEQ ID NO: 366

SEQ ID NO: 1380 - DNA, 239 bp, Muntiacus crinifrons; identical to SEQ ID NO: 367

SEQ ID NO: 1381 - DNA, 242 bp, Cervus elaphus; identical to SEQ ID NO: 368

SEQ ID NO: 1382 - DNA, 242 bp, Cervus albirostris; identical to SEQ ID NO: 369

SEQ ID NO: 1383 - DNA, 242 bp, Cervus hanglu; identical to SEQ ID NO: 370

SEQ ID NO: 1384 - DNA, 242 bp, Elaphurus davidianus; identical to SEQ ID NO: 371

SEQ ID NO: 1385 - DNA, 242 bp, Axis porcinus; identical to SEQ ID NO: 372

SEQ ID NO: 1386 - DNA, 241 bp, Alces alces; identical to SEQ ID NO: 373

SEQ ID NO: 1387 - DNA, 242 bp, Odocoileus hemionus; identical to SEQ ID NO: 375

SEQ ID NO: 1388 - DNA, 242 bp, Odocoileus hemionus; identical to SEQ ID NO: 376

SEQ ID NO: 1389 - DNA, 242 bp, Odocoileus virginianus; identical to SEQ ID NO: 377

SEQ ID NO: 1390 - DNA, 242 bp, Odocoileus virginianus; identical to SEQ ID NO: 378

SEQ ID NO: 1391 - DNA, 242 bp, Rangifer tarandus; identical to SEQ ID NO: 379

SEQ ID NO: 1392 - DNA, 242 bp, Rangifer tarandus; identical to SEQ ID NO: 380

SEQ ID NO: 1393 - DNA, 238 bp, Procapra przewalskii; identical to SEQ ID NO: 381

SEQ ID NO: 1394 - DNA, 242 bp, Antilocapra americana; identical to SEQ ID NO: 382

SEQ ID NO: 1395 - DNA, 242 bp, Antilocapra americana; identical to SEQ ID NO: 383

SEQ ID NO: 1396 - DNA, 243 bp, Moschus moschiferus; identical to SEQ ID NO: 384

SEQ ID NO: 1397 - DNA, 243 bp, Moschus chrysogaster; identical to SEQ ID NO: 386

SEQ ID NO: 1398 - DNA, 251 bp, Bubalus bubalis; identical to SEQ ID NO: 389

SEQ ID NO: 1399 - DNA, 243 bp, Balaenoptera bonaerensis; identical to SEQ ID NO: 390

SEQ ID NO: 1400 - DNA, 243 bp, Eschrichtius robustus; identical to SEQ ID NO: 391

SEQ ID NO: 1401 - DNA, 243 bp, Eschrichtius robustus; identical to SEQ ID NO: 393

SEQ ID NO: 1402 - DNA, 243 bp, Megaptera novaeangliae; identical to SEQ ID NO: 394

SEQ ID NO: 1403 - DNA, 243 bp, Balaenoptera musculus; identical to SEQ ID NO: 395

SEQ ID NO: 1404 - DNA, 243 bp, Balaenoptera musculus; identical to SEQ ID NO: 396

SEQ ID NO: 1405 - DNA, 240 bp, Balaenoptera physalus; identical to SEQ ID NO: 397

SEQ ID NO: 1406 - DNA, 241 bp, Eubalaena japonica; identical to SEQ ID NO: 398

SEQ ID NO: 1407 - DNA, 245 bp, Balaenoptera acutorostrata; identical to SEQ ID NO: 399

SEQ ID NO: 1408 - DNA, 243 bp, Platanista minor; identical to SEQ ID NO: 400

SEQ ID NO: 1409 - DNA, 243 bp, Phocoena phocoena; identical to SEQ ID NO: 401

SEQ ID NO: 1410 - DNA, 243 bp, Neophocaena asiaeorientalis; identical to SEQ ID NO: 402

SEQ ID NO: 1411 - DNA, 243 bp, Phocoena sinus; identical to SEQ ID NO: 403

SEQ ID NO: 1412 - DNA, 243 bp, Monodon monoceros; identical to SEQ ID NO: 404

SEQ ID NO: 1413 - DNA, 243 bp, Monodon monoceros; identical to SEQ ID NO: 405

SEQ ID NO: 1414 - DNA, 243 bp, Delphinapterus leucas; identical to SEQ ID NO: 408

SEQ ID NO: 1415 - DNA, 243 bp, Tursiops truncatus; identical to SEQ ID NO: 411

SEQ ID NO: 1416 - DNA, 243 bp, Tursiops truncatus; identical to SEQ ID NO: 414

SEQ ID NO: 1417 - DNA, 243 bp, Tursiops truncatus; identical to SEQ ID NO: 419

SEQ ID NO: 1418 - DNA, 243 bp, Sousa chinensis; identical to SEQ ID NO: 420

SEQ ID NO: 1419 - DNA, 243 bp, Lagenorhynchus obliquidens; identical to SEQ ID NO: 422

SEQ ID NO: 1420 - DNA, 243 bp, Globicephala melas; identical to SEQ ID NO: 423

SEQ ID NO: 1421 - DNA, 243 bp, Orcinus orca; identical to SEQ ID NO: 424

SEQ ID NO: 1422 - DNA, 243 bp, Lipotes vexillifer; identical to SEQ ID NO: 425

SEQ ID NO: 1423 - DNA, 243 bp, Inia geoffrensis; identical to SEQ ID NO: 426

SEQ ID NO: 1424 - DNA, 242 bp, Pontoporia blainvillei; identical to SEQ ID NO: 427

SEQ ID NO: 1425 - DNA, 243 bp, Kogia breviceps; identical to SEQ ID NO: 429

SEQ ID NO: 1426 - DNA, 242 bp, Physeter catodon; identical to SEQ ID NO: 430

SEQ ID NO: 1427 - DNA, 242 bp, Mesoplodon bidens; identical to SEQ ID NO: 433

SEQ ID NO: 1428 - DNA, 242 bp, Ziphius cavirostris; identical to SEQ ID NO: 434

SEQ ID NO: 1429 - DNA, 242 bp, Hippopotamus amphibius; identical to SEQ ID NO: 435

SEQ ID NO: 1430 - DNA, 242 bp, Hippopotamus amphibius; identical to SEQ ID NO: 436

SEQ ID NO: 1431 - DNA, 258 bp, Vicugna pacos; identical to SEQ ID NO: 437

SEQ ID NO: 1432 - DNA, 258 bp, Lama guanicoe; identical to SEQ ID NO: 440

SEQ ID NO: 1433 - DNA, 258 bp, Lama glama; identical to SEQ ID NO: 441

SEQ ID NO: 1434 - DNA, 258 bp, Camelus dromedarius; identical to SEQ ID NO: 442

SEQ ID NO: 1435 - DNA, 258 bp, Camelus dromedarius; identical to SEQ ID NO: 444

SEQ ID NO: 1436 - DNA, 258 bp, Camelus ferus; identical to SEQ ID NO: 445

SEQ ID NO: 1437 - DNA, 258 bp, Camelus bactrianus; identical to SEQ ID NO: 446

SEQ ID NO: 1438 - DNA, 245 bp, Tragulus javanicus; identical to SEQ ID NO: 448

SEQ ID NO: 1439 - DNA, 245 bp, Tragulus kanchil; identical to SEQ ID NO: 449

SEQ ID NO: 1440 - DNA, 253 bp, Sus scrofa; identical to SEQ ID NO: 450

SEQ ID NO: 1441 - DNA, 253 bp, Sus scrofa; identical to SEQ ID NO: 454

SEQ ID NO: 1442 - DNA, 253 bp, Sus scrofa; identical to SEQ ID NO: 455

SEQ ID NO: 1443 - DNA, 253 bp, Sus scrofa; identical to SEQ ID NO: 462

SEQ ID NO: 1444 - DNA, 253 bp, Sus scrofa; identical to SEQ ID NO: 464

SEQ ID NO: 1445 - DNA, 253 bp, Sus scrofa; identical to SEQ ID NO: 465

SEQ ID NO: 1446 - DNA, 253 bp, Sus scrofa; identical to SEQ ID NO: 467

SEQ ID NO: 1447 - DNA, 253 bp, Catagonus wagneri; identical to SEQ ID NO: 468

SEQ ID NO: 1448 - DNA, 255 bp, Felis catus; identical to SEQ ID NO: 475

SEQ ID NO: 1449 - DNA, 254 bp, Felis nigripes; identical to SEQ ID NO: 476

SEQ ID NO: 1450 - DNA, 254 bp, Felis catus; identical to SEQ ID NO: 477

SEQ ID NO: 1451 - DNA, 254 bp, Puma concolor; identical to SEQ ID NO: 479

SEQ ID NO: 1452 - DNA, 254 bp, Acinonyx jubatus; identical to SEQ ID NO: 481

SEQ ID NO: 1453 - DNA, 254 bp, Lynx pardinus; identical to SEQ ID NO: 483

SEQ ID NO: 1454 - DNA, 254 bp, Lynx canadensis; identical to SEQ ID NO: 484

SEQ ID NO: 1455 - DNA, 254 bp, Puma yagouaroundi; identical to SEQ ID NO: 485

SEQ ID NO: 1456 - DNA, 252 bp, Panthera onca; identical to SEQ ID NO: 486

SEQ ID NO: 1457 - DNA, 252 bp, Panthera pardus; identical to SEQ ID NO: 487

SEQ ID NO: 1458 - DNA, 252 bp, Panthera leo; identical to SEQ ID NO: 488

SEQ ID NO: 1459 - DNA, 252 bp, Panthera leo; identical to SEQ ID NO: 489

SEQ ID NO: 1460 - DNA, 252 bp, Panthera tigris; identical to SEQ ID NO: 490

SEQ ID NO: 1461 - DNA, 254 bp, Paradoxurus hermaphroditus; identical to SEQ ID NO: 491

SEQ ID NO: 1462 - DNA, 254 bp, Hyaena hyaena; identical to SEQ ID NO: 492

SEQ ID NO: 1463 - DNA, 254 bp, Crocuta crocuta; identical to SEQ ID NO: 494

SEQ ID NO: 1464 - DNA, 254 bp, Mungos mungo; identical to SEQ ID NO: 495

SEQ ID NO: 1465 - DNA, 254 bp, Helogale parvula; identical to SEQ ID NO: 496

SEQ ID NO: 1466 - DNA, 254 bp, Suricata suricatta; identical to SEQ ID NO: 497

SEQ ID NO: 1467 - DNA, 254 bp, Cryptoprocta ferox; identical to SEQ ID NO: 499

SEQ ID NO: 1468 - DNA, 252 bp, Ailurus fulgens; identical to SEQ ID NO: 500

SEQ ID NO: 1469 - DNA, 253 bp, Ursus americanus; identical to SEQ ID NO: 501

SEQ ID NO: 1470 - DNA, 253 bp, Ursus thibetanus; identical to SEQ ID NO: 502

SEQ ID NO: 1471 - DNA, 253 bp, Ursus thibetanus; identical to SEQ ID NO: 503

SEQ ID NO: 1472 - DNA, 253 bp, Ursus maritimus; identical to SEQ ID NO: 504

SEQ ID NO: 1473 - DNA, 253 bp, Ursus arctos; identical to SEQ ID NO: 505

SEQ ID NO: 1474 - DNA, 253 bp, Ailuropoda melanoleuca; identical to SEQ ID NO: 506

SEQ ID NO: 1475 - DNA, 253 bp, Taxidea taxus; identical to SEQ ID NO: 508

SEQ ID NO: 1476 - DNA, 254 bp, Mirounga angustirostris; identical to SEQ ID NO: 509

SEQ ID NO: 1477 - DNA, 254 bp, Mirounga leonina; identical to SEQ ID NO: 510

SEQ ID NO: 1478 - DNA, 254 bp, Leptonychotes weddellii; identical to SEQ ID NO: 511

SEQ ID NO: 1479 - DNA, 254 bp, Neomonachus schauinslandi; identical to SEQ ID NO: 512

SEQ ID NO: 1480 - DNA, 254 bp, Phoca vitulina; identical to SEQ ID NO: 513

SEQ ID NO: 1481 - DNA, 254 bp, Halichoerus grypus; identical to SEQ ID NO: 514

SEQ ID NO: 1482 - DNA, 254 bp, Zalophus californianus; identical to SEQ ID NO: 515

SEQ ID NO: 1483 - DNA, 254 bp, Callorhinus ursinus; identical to SEQ ID NO: 521

SEQ ID NO: 1484 - DNA, 254 bp, Odobenus rosmarus; identical to SEQ ID NO: 522

SEQ ID NO: 1485 - DNA, 254 bp, Pteronura brasiliensis; identical to SEQ ID NO: 523

SEQ ID NO: 1486 - DNA, 254 bp, Neogale vison; identical to SEQ ID NO: 524

SEQ ID NO: 1487 - DNA, 254 bp, Lontra canadensis; identical to SEQ ID NO: 525

SEQ ID NO: 1488 - DNA, 254 bp, Lutra lutra; identical to SEQ ID NO: 526

SEQ ID NO: 1489 - DNA, 253 bp, Enhydra lutris; identical to SEQ ID NO: 528

SEQ ID NO: 1490 - DNA, 254 bp, Martes zibellina; identical to SEQ ID NO: 530

SEQ ID NO: 1491 - DNA, 254 bp, Gulo gulo; identical to SEQ ID NO: 531

SEQ ID NO: 1492 - DNA, 254 bp, Mustela erminea; identical to SEQ ID NO: 532

SEQ ID NO: 1493 - DNA, 255 bp, Mustela putorius; identical to SEQ ID NO: 534

SEQ ID NO: 1494 - DNA, 254 bp, Mustela putorius; identical to SEQ ID NO: 535

SEQ ID NO: 1495 - DNA, 255 bp, Mustela putorius; identical to SEQ ID NO: 549

SEQ ID NO: 1496 - DNA, 255 bp, Mustela putorius; identical to SEQ ID NO: 550

SEQ ID NO: 1497 - DNA, 252 bp, Mustela putorius; identical to SEQ ID NO: 551

SEQ ID NO: 1498 - DNA, 253 bp, Mustela putorius; identical to SEQ ID NO: 553

SEQ ID NO: 1499 - DNA, 254 bp, Mustela putorius; identical to SEQ ID NO: 555

SEQ ID NO: 1500 - DNA, 250 bp, Mustela putorius; identical to SEQ ID NO: 556

SEQ ID NO: 1501 - DNA, 254 bp, Mellivora capensis; identical to SEQ ID NO: 557

SEQ ID NO: 1502 - DNA, 254 bp, Potos flavus; identical to SEQ ID NO: 558

SEQ ID NO: 1503 - DNA, 253 bp, Procyon lotor
tgagcttccctccgccctacgagaaagggagggtccacagagcatttataaggctcccatatgtaaagccatttcacagttatggtgacttcccacaacgcatagcaacatgcaaatatcgtggggagtgcctcccctgtcccttgtacgcgtcttctcggacgcacgcacgcgcgctgtgttcccgccctgtgactccgggcgggcaattctcgggaggaggttgctgacgggaacgttcaggcttcatggc

SEQ ID NO: 1504 - DNA, 254 bp, Spilogale gracilis
tgagcttccctccgccctacgcaaaaaggtggtctcaaagagcatttataaggctcccatacctaatggcatttctcagttacggtgacttcccgcaatgcatagcaacatgcaaatatagcggggagtgcttcctcgatccctcctccgcgtcttctcaggacgcacgcacgcgcgctacgttcccgccctgtgactccaggcaggcaattcctgggagagggttgctgacgggaaagttcaggctccatggc

SEQ ID NO: 1505 - DNA, 243 bp, Balaenoptera bonaerensis; identical to SEQ ID NO: 390

SEQ ID NO: 1506 - DNA, 243 bp, Eschrichtius robustus; identical to SEQ ID NO: 391

SEQ ID NO: 1507 - DNA, 243 bp, Eschrichtius robustus; identical to SEQ ID NO: 393

SEQ ID NO: 1508 - DNA, 243 bp, Megaptera novaeangliae; identical to SEQ ID NO: 394

SEQ ID NO: 1509 - DNA, 243 bp, Balaenoptera musculus; identical to SEQ ID NO: 395

SEQ ID NO: 1510 - DNA, 243 bp, Balaenoptera musculus; identical to SEQ ID NO: 396

SEQ ID NO: 1511 - DNA, 240 bp, Balaenoptera physalus; identical to SEQ ID NO: 397

SEQ ID NO: 1512 - DNA, 241 bp, Eubalaena japonica; identical to SEQ ID NO: 398

SEQ ID NO: 1513 - DNA, 245 bp, Balaenoptera acutorostrata; identical to SEQ ID NO: 399

SEQ ID NO: 1514 - DNA, 243 bp, Platanista minor; identical to SEQ ID NO: 400

SEQ ID NO: 1515 - DNA, 243 bp, Phocoena phocoena; identical to SEQ ID NO: 401

SEQ ID NO: 1516 - DNA, 243 bp, Neophocaena asiaeorientalis; identical to SEQ ID NO: 402

SEQ ID NO: 1517 - DNA, 243 bp, Phocoena sinus; identical to SEQ ID NO: 403

SEQ ID NO: 1518 - DNA, 243 bp, Monodon monoceros; identical to SEQ ID NO: 404

SEQ ID NO: 1519 - DNA, 243 bp, Monodon monoceros; identical to SEQ ID NO: 405

SEQ ID NO: 1520 - DNA, 243 bp, Delphinapterus leucas; identical to SEQ ID NO: 408

SEQ ID NO: 1521 - DNA, 243 bp, Tursiops truncatus; identical to SEQ ID NO: 411

SEQ ID NO: 1522 - DNA, 243 bp, Tursiops truncatus; identical to SEQ ID NO: 414

SEQ ID NO: 1523 - DNA, 243 bp, Sousa chinensis; identical to SEQ ID NO: 420

SEQ ID NO: 1524 - DNA, 243 bp, Lagenorhynchus obliquidens; identical to SEQ ID NO: 422

SEQ ID NO: 1525 - DNA, 243 bp, Globicephala melas; identical to SEQ ID NO: 423

SEQ ID NO: 1526 - DNA, 243 bp, Orcinus orca; identical to SEQ ID NO: 424

SEQ ID NO: 1527 - DNA, 243 bp, Lipotes vexillifer; identical to SEQ ID NO: 425

SEQ ID NO: 1528 - DNA, 243 bp, Inia geoffrensis; identical to SEQ ID NO: 426

SEQ ID NO: 1529 - DNA, 242 bp, Pontoporia blainvillei; identical to SEQ ID NO: 427

SEQ ID NO: 1530 - DNA, 243 bp, Kogia breviceps; identical to SEQ ID NO: 429

SEQ ID NO: 1531 - DNA, 242 bp, Physeter catodon; identical to SEQ ID NO: 430

SEQ ID NO: 1532 - DNA, 242 bp, Mesoplodon bidens; identical to SEQ ID NO: 433

SEQ ID NO: 1533 - DNA, 242 bp, Ziphius cavirostris; identical to SEQ ID NO: 434

SEQ ID NO: 1534 - DNA, 255 bp, Felis catus; identical to SEQ ID NO: 475

SEQ ID NO: 1535 - DNA, 254 bp, Felis nigripes; identical to SEQ ID NO: 476

SEQ ID NO: 1536 - DNA, 254 bp, Felis catus; identical to SEQ ID NO: 477

SEQ ID NO: 1537 - DNA, 254 bp, Puma concolor; identical to SEQ ID NO: 479

SEQ ID NO: 1538 - DNA, 254 bp, Acinonyx jubatus; identical to SEQ ID NO: 481

SEQ ID NO: 1539 - DNA, 254 bp, Lynx pardinus; identical to SEQ ID NO: 483

SEQ ID NO: 1540 - DNA, 254 bp, Lynx canadensis; identical to SEQ ID NO: 484

SEQ ID NO: 1541 - DNA, 254 bp, Puma yagouaroundi; identical to SEQ ID NO: 485

SEQ ID NO: 1542 - DNA, 252 bp, Panthera onca; identical to SEQ ID NO: 486

SEQ ID NO: 1543 - DNA, 252 bp, Panthera pardus; identical to SEQ ID NO: 487

SEQ ID NO: 1544 - DNA, 252 bp, Panthera leo; identical to SEQ ID NO: 488

SEQ ID NO: 1545 - DNA, 252 bp, Panthera leo; identical to SEQ ID NO: 489

SEQ ID NO: 1546 - DNA, 252 bp, Panthera tigris; identical to SEQ ID NO: 490

SEQ ID NO: 1547 - DNA, 254 bp, Paradoxurus hermaphroditus; identical to SEQ ID NO: 491

SEQ ID NO: 1548 - DNA, 254 bp, Hyaena hyaena; identical to SEQ ID NO: 492

SEQ ID NO: 1549 - DNA, 254 bp, Crocuta crocuta; identical to SEQ ID NO: 494

SEQ ID NO: 1550 - DNA, 254 bp, Mungos mungo; identical to SEQ ID NO: 495

SEQ ID NO: 1551 - DNA, 254 bp, Helogale parvula; identical to SEQ ID NO: 496

SEQ ID NO: 1552 - DNA, 254 bp, Suricata suricatta; identical to SEQ ID NO: 497

SEQ ID NO: 1553 - DNA, 254 bp, Cryptoprocta ferox; identical to SEQ ID NO: 499

SEQ ID NO: 1554 - DNA, 252 bp, Ailurus fulgens; identical to SEQ ID NO: 500

SEQ ID NO: 1555 - DNA, 253 bp, Ursus americanus; identical to SEQ ID NO: 501

SEQ ID NO: 1556 - DNA, 253 bp, Ursus thibetanus; identical to SEQ ID NO: 502

SEQ ID NO: 1557 - DNA, 253 bp, Ursus thibetanus; identical to SEQ ID NO: 503

SEQ ID NO: 1558 - DNA, 253 bp, Ursus maritimus; identical to SEQ ID NO: 504

SEQ ID NO: 1559 - DNA, 253 bp, Ursus arctos; identical to SEQ ID NO: 505

SEQ ID NO: 1560 - DNA, 253 bp, Ailuropoda melanoleuca; identical to SEQ ID NO: 506

SEQ ID NO: 1561 - DNA, 253 bp, Taxidea taxus; identical to SEQ ID NO: 508

SEQ ID NO: 1562 - DNA, 254 bp, Mirounga angustirostris; identical to SEQ ID NO: 509

SEQ ID NO: 1563 - DNA, 254 bp, Mirounga leonina; identical to SEQ ID NO: 510

SEQ ID NO: 1564 - DNA, 254 bp, Leptonychotes weddellii; identical to SEQ ID NO: 511

SEQ ID NO: 1565 - DNA, 254 bp, Neomonachus schauinslandi; identical to SEQ ID NO: 512

SEQ ID NO: 1566 - DNA, 254 bp, Phoca vitulina; identical to SEQ ID NO: 513

SEQ ID NO: 1567 - DNA, 254 bp, Halichoerus grypus; identical to SEQ ID NO: 514

SEQ ID NO: 1568 - DNA, 254 bp, Zalophus californianus; identical to SEQ ID NO: 515

SEQ ID NO: 1569 - DNA, 254 bp, Callorhinus ursinus; identical to SEQ ID NO: 521

SEQ ID NO: 1570 - DNA, 254 bp, Odobenus rosmarus; identical to SEQ ID NO: 522

SEQ ID NO: 1571 - DNA, 254 bp, Pteronura brasiliensis; identical to SEQ ID NO: 523

SEQ ID NO: 1572 - DNA, 254 bp, Neogale vison; identical to SEQ ID NO: 524

SEQ ID NO: 1573 - DNA, 254 bp, Lontra canadensis; identical to SEQ ID NO: 525

SEQ ID NO: 1574 - DNA, 254 bp, Lutra lutra; identical to SEQ ID NO: 526

SEQ ID NO: 1575 - DNA, 253 bp, Enhydra lutris; identical to SEQ ID NO: 528

SEQ ID NO: 1576 - DNA, 254 bp, Martes zibellina; identical to SEQ ID NO: 530

SEQ ID NO: 1577 - DNA, 254 bp, Gulo gulo; identical to SEQ ID NO: 531

SEQ ID NO: 1578 - DNA, 254 bp, Mustela erminea; identical to SEQ ID NO: 532

SEQ ID NO: 1579 - DNA, 255 bp, Mustela putorius; identical to SEQ ID NO: 534

SEQ ID NO: 1580 - DNA, 254 bp, Mustela putorius; identical to SEQ ID NO: 535

SEQ ID NO: 1581 - DNA, 255 bp, Mustela putorius; identical to SEQ ID NO: 549

SEQ ID NO: 1582 - DNA, 255 bp, Mustela putorius; identical to SEQ ID NO: 550

SEQ ID NO: 1583 - DNA, 252 bp, Mustela putorius; identical to SEQ ID NO: 551

SEQ ID NO: 1584 - DNA, 253 bp, Mustela putorius; identical to SEQ ID NO: 553

SEQ ID NO: 1585 - DNA, 254 bp, Mustela putorius; identical to SEQ ID NO: 555

SEQ ID NO: 1586 - DNA, 250 bp, Mustela putorius; identical to SEQ ID NO: 556

SEQ ID NO: 1587 - DNA, 254 bp, Mellivora capensis; identical to SEQ ID NO: 557

SEQ ID NO: 1588 - DNA, 254 bp, Potos flavus; identical to SEQ ID NO: 558

SEQ ID NO: 1589 - DNA, 253 bp, Procyon lotor; identical to SEQ ID NO: 1503

SEQ ID NO: 1590 - DNA, 254 bp, Spilogale gracilis; identical to SEQ ID NO: 1504

SEQ ID NO: 1591 - DNA, 253 bp, Equus asinus; identical to SEQ ID NO: 735

SEQ ID NO: 1592 - DNA, 253 bp, Equus caballus; identical to SEQ ID NO: 738

SEQ ID NO: 1593 - DNA, 253 bp, Equus przewalskii; identical to SEQ ID NO: 739

SEQ ID NO: 1594 - DNA, 257 bp, Dicerorhinus sumatrensis; identical to SEQ ID NO: 740

SEQ ID NO: 1595 - DNA, 256 bp, Diceros bicornis; identical to SEQ ID NO: 742

SEQ ID NO: 1596 - DNA, 256 bp, Ceratotherium simum; identical to SEQ ID NO: 743

SEQ ID NO: 1597 - DNA, 256 bp, Diceros bicornis; identical to SEQ ID NO: 745

SEQ ID NO: 1598 - DNA, 256 bp, Tapirus indicus; identical to SEQ ID NO: 746

SEQ ID NO: 1599 - DNA, 256 bp, Tapirus terrestris; identical to SEQ ID NO: 747

SEQ ID NO: 1600 - DNA, 256 bp, Homo sapiens; identical to SEQ ID NO: 771

SEQ ID NO: 1601 - DNA, 256 bp, Gorilla gorilla; identical to SEQ ID NO: 766

SEQ ID NO: 1602 - DNA, 256 bp, Pan paniscus; identical to SEQ ID NO: 770

SEQ ID NO: 1603 - DNA, 255 bp, Pan troglodytes; identical to SEQ ID NO: 783

SEQ ID NO: 1604 - DNA, 256 bp, Nomascus leucogenys; identical to SEQ ID NO: 765

SEQ ID NO: 1605 - DNA, 257 bp, Papio anubis; identical to SEQ ID NO: 762

SEQ ID NO: 1606 - DNA, 256 bp, Macaca fascicularis; identical to SEQ ID NO: 768

SEQ ID NO: 1607 - DNA, 256 bp, Macaca mulatta; identical to SEQ ID NO: 778

SEQ ID NO: 1608 - DNA, 256 bp, Macaca mulatta; identical to SEQ ID NO: 773

SEQ ID NO: 1609 - DNA, 256 bp, Mandrillus leucophaeus; identical to SEQ ID NO: 777

SEQ ID NO: 1610 - DNA, 256 bp, Cercocebus atys; identical to SEQ ID NO: 776

SEQ ID NO: 1611 - DNA, 256 bp, Macaca nemestrina; identical to SEQ ID NO: 775

SEQ ID NO: 1612 - DNA, 256 bp, Rhinopithecus roxellana; identical to SEQ ID NO: 772

SEQ ID NO: 1613 - DNA, 256 bp, Rhinopithecus bieti; identical to SEQ ID NO: 767

SEQ ID NO: 1614 - DNA, 256 bp, Chlorocebus sabaeus; identical to SEQ ID NO: 774

SEQ ID NO: 1615 - DNA, 257 bp, Colobus angolensis; identical to SEQ ID NO: 764

SEQ ID NO: 1616 - DNA, 257 bp, Piliocolobus tephrosceles; identical to SEQ ID NO: 763

SEQ ID NO: 1617 - DNA, 255 bp, Pongo abelii; identical to SEQ ID NO: 779

SEQ ID NO: 1618 - DNA, 252 bp, Aotus nancymaae; identical to SEQ ID NO: 759

SEQ ID NO: 1619 - DNA, 254 bp, Saimiri boliviensis; identical to SEQ ID NO: 757

SEQ ID NO: 1620 - DNA, 254 bp, Callithrix jacchus; identical to SEQ ID NO: 758

SEQ ID NO: 1621 - DNA, 254 bp, Callithrix jacchus; identical to SEQ ID NO: 755

SEQ ID NO: 1622 - DNA, 254 bp, Cebus imitator; identical to SEQ ID NO: 756

SEQ ID NO: 1623 - DNA, 263 bp, Microcebus murinus; identical to SEQ ID NO: 760

SEQ ID NO: 1624 - DNA, 256 bp, Propithecus coquereli; identical to SEQ ID NO: 769

SEQ ID NO: 1625 - DNA, 252 bp, Eulemur flavifrons; identical to SEQ ID NO: 781

SEQ ID NO: 1626 - DNA, 254 bp, Carlito syrichta; identical to SEQ ID NO: 780

SEQ ID NO: 1627 - DNA, 262 bp, Otolemur garnettii; identical to SEQ ID NO: 761

SEQ ID NO: 1628 - DNA, 231 bp, Galeopterus variegatus; identical to SEQ ID NO: 680

SEQ ID NO: 1629 - DNA, 230 bp, Tupaia chinensis; identical to SEQ ID NO: 782

SEQ ID NO: 1630 - DNA, 261 bp, Manis pentadactyla; identical to SEQ ID NO: 725

SEQ ID NO: 1631 - DNA, 259 bp, Manis javanica; identical to SEQ ID NO: 726

SEQ ID NO: 1632 - DNA, 259 bp, Manis javanica; identical to SEQ ID NO: 727

SEQ ID NO: 1633 - DNA, 258 bp, Phataginus tricuspis; identical to SEQ ID NO: 728

SEQ ID NO: 1634 - DNA, 244 bp, Megaderma lyra; identical to SEQ ID NO: 615

SEQ ID NO: 1635 - DNA, 244 bp, Megaderma lyra; identical to SEQ ID NO: 616

SEQ ID NO: 1636 - DNA, 252 bp, Rhinolophus ferrumequinum; identical to SEQ ID NO: 617

SEQ ID NO: 1637 - DNA, 252 bp, Rhinolophus ferrumequinum; identical to SEQ ID NO: 619

SEQ ID NO: 1638 - DNA, 252 bp, Rhinolophus ferrumequinum; identical to SEQ ID NO: 620

SEQ ID NO: 1639 - DNA, 252 bp, Rhinolophus sinicus; identical to SEQ ID NO: 621

SEQ ID NO: 1640 - DNA, 252 bp, Hipposideros galeritus; identical to SEQ ID NO: 622

SEQ ID NO: 1641 - DNA, 255 bp, Hipposideros armiger; identical to SEQ ID NO: 623

SEQ ID NO: 1642 - DNA, 261 bp, Eonycteris spelaea; identical to SEQ ID NO: 624

SEQ ID NO: 1643 - DNA, 261 bp, Rousettus aegyptiacus; identical to SEQ ID NO: 625

SEQ ID NO: 1644 - DNA, 262 bp, Rousettus leschenaultii; identical to SEQ ID NO: 629

SEQ ID NO: 1645 - DNA, 262 bp, Pteropus pselaphon; identical to SEQ ID NO: 630

SEQ ID NO: 1646 - DNA, 262 bp, Pteropus vampyrus; identical to SEQ ID NO: 631

SEQ ID NO: 1647 - DNA, 263 bp, Pteropus giganteus; identical to SEQ ID NO: 632

SEQ ID NO: 1648 - DNA, 262 bp, Pteropus alecto; identical to SEQ ID NO: 633

SEQ ID NO: 1649 - DNA, 262 bp, Macroglossus sobrinus; identical to SEQ ID NO: 634

SEQ ID NO: 1650 - DNA, 219 bp, Cynopterus brachyotis; identical to SEQ ID NO: 635

SEQ ID NO: 1651 - DNA, 255 bp, Pteronotus parnellii; identical to SEQ ID NO: 636

SEQ ID NO: 1652 - DNA, 253 bp, Tonatia saurophila; identical to SEQ ID NO: 637

SEQ ID NO: 1653 - DNA, 251 bp, Phyllostomus discolor; identical to SEQ ID NO: 638

SEQ ID NO: 1654 - DNA, 251 bp, Phyllostomus discolor; identical to SEQ ID NO: 639

SEQ ID NO: 1655 - DNA, 252 bp, Micronycteris hirsuta; identical to SEQ ID NO: 640

SEQ ID NO: 1656 - DNA, 255 bp, Macrotus californicus; identical to SEQ ID NO: 641

SEQ ID NO: 1657 - DNA, 253 bp, Anoura caudifer; identical to SEQ ID NO: 642

SEQ ID NO: 1658 - DNA, 252 bp, Artibeus jamaicensis; identical to SEQ ID NO: 643

SEQ ID NO: 1659 - DNA, 252 bp, Artibeus jamaicensis; identical to SEQ ID NO: 644

SEQ ID NO: 1660 - DNA, 252 bp, Sturnira hondurensis; identical to SEQ ID NO: 645

SEQ ID NO: 1661 - DNA, 252 bp, Carollia perspicillata; identical to SEQ ID NO: 646

SEQ ID NO: 1662 - DNA, 253 bp, Mormoops blainvillei; identical to SEQ ID NO: 647

SEQ ID NO: 1663 - DNA, 250 bp, Desmodus rotundus; identical to SEQ ID NO: 648

SEQ ID NO: 1664 - DNA, 225 bp, Tadarida brasiliensis; identical to SEQ ID NO: 649

SEQ ID NO: 1665 - DNA, 239 bp, Molossus molossus; identical to SEQ ID NO: 650

SEQ ID NO: 1666 - DNA, 256 bp, Miniopterus schreibersii; identical to SEQ ID NO: 651

SEQ ID NO: 1667 - DNA, 256 bp, Miniopterus natalensis; identical to SEQ ID NO: 652

SEQ ID NO: 1668 - DNA, 256 bp, Pipistrellus pipistrellus; identical to SEQ ID NO: 653

SEQ ID NO: 1669 - DNA, 256 bp, Pipistrellus pipistrellus; identical to SEQ ID NO: 654

SEQ ID NO: 1670 - DNA, 254 bp, Pipistrellus pipistrellus; identical to SEQ ID NO: 655

SEQ ID NO: 1671 - DNA, 256 bp, Pipistrellus pipistrellus; identical to SEQ ID NO: 656

SEQ ID NO: 1672 - DNA, 257 bp, Pipistrellus kuhlii; identical to SEQ ID NO: 657

SEQ ID NO: 1673 - DNA, 255 bp, Lasiurus borealis; identical to SEQ ID NO: 658

SEQ ID NO: 1674 - DNA, 254 bp, Aeorestes cinereus; identical to SEQ ID NO: 659

SEQ ID NO: 1675 - DNA, 255 bp, Aeorestes cinereus; identical to SEQ ID NO: 660

SEQ ID NO: 1676 - DNA, 257 bp, Eptesicus fuscus; identical to SEQ ID NO: 661

SEQ ID NO: 1677 - DNA, 256 bp, Nycticeius humeralis; identical to SEQ ID NO: 662

SEQ ID NO: 1678 - DNA, 225 bp, Murina aurata; identical to SEQ ID NO: 663

SEQ ID NO: 1679 - DNA, 256 bp, Myotis myotis; identical to SEQ ID NO: 664

SEQ ID NO: 1680 - DNA, 256 bp, Myotis lucifugus; identical to SEQ ID NO: 666

SEQ ID NO: 1681 - DNA, 256 bp, Myotis brandtii; identical to SEQ ID NO: 667

SEQ ID NO: 1682 - DNA, 256 bp, Myotis davidii; identical to SEQ ID NO: 668

SEQ ID NO: 1683 - DNA, 256 bp, Antrozous pallidus; identical to SEQ ID NO: 669

SEQ ID NO: 1684 - DNA, 252 bp, Noctilio leporinus; identical to SEQ ID NO: 670

SEQ ID NO: 1685 - DNA, 220 bp, Craseonycteris thonglongyai; identical to SEQ ID NO: 671

SEQ ID NO: 1686 - DNA, 240 bp, Choloepus hoffmanni; identical to SEQ ID NO: 910

SEQ ID NO: 1687 - DNA, 239 bp, Choloepus didactylus; identical to SEQ ID NO: 911

SEQ ID NO: 1688 - DNA, 239 bp, Choloepus didactylus; identical to SEQ ID NO: 912

SEQ ID NO: 1689 - DNA, 239 bp, Choloepus didactylus; identical to SEQ ID NO: 913

SEQ ID NO: 1690 - DNA, 238 bp, Bradypus variegatus; identical to SEQ ID NO: 914

SEQ ID NO: 1691 - DNA, 238 bp, Tamandua tetradactyla; identical to SEQ ID NO: 915

SEQ ID NO: 1692 - DNA, 238 bp, Myrmecophaga tridactyla; identical to SEQ ID NO: 916

SEQ ID NO: 1693 - DNA, 237 bp, Tolypeutes matacus; identical to SEQ ID NO: 917

SEQ ID NO: 1694 - DNA, 237 bp, Chaetophractus vellerosus; identical to SEQ ID NO: 918

SEQ ID NO: 1695 - DNA, 236 bp, Dasypus novemcinctus; identical to SEQ ID NO: 919

SEQ ID NO: 1696 - DNA, 237 bp, Erinaceus europaeus; identical to SEQ ID NO: 684

SEQ ID NO: 1697 - DNA, 237 bp, Erinaceus europaeus; identical to SEQ ID NO: 685

SEQ ID NO: 1698 - DNA, 258 bp, Solenodon paradoxus; identical to SEQ ID NO: 686

SEQ ID NO: 1699 - DNA, 258 bp, Solenodon paradoxus; identical to SEQ ID NO: 687

SEQ ID NO: 1700 - DNA, 251 bp, Scalopus aquaticus; identical to SEQ ID NO: 688

SEQ ID NO: 1701 - DNA, 271 bp, Condylura cristata; identical to SEQ ID NO: 689

SEQ ID NO: 1702 - DNA, 246 bp, Uropsilus gracilis; identical to SEQ ID NO: 690

SEQ ID NO: 1703 - DNA, 229 bp, Sorex araneus; identical to SEQ ID NO: 691

SEQ ID NO: 1704 - DNA, 236 bp, Ochotona princeps; identical to SEQ ID NO: 698

SEQ ID NO: 1705 - DNA, 236 bp, Ochotona princeps; identical to SEQ ID NO: 699

SEQ ID NO: 1706 - DNA, 237 bp, Lepus americanus; identical to SEQ ID NO: 700

SEQ ID NO: 1707 - DNA, 237 bp, Lepus timidus; identical to SEQ ID NO: 701

SEQ ID NO: 1708 - DNA, 236 bp, Oryctolagus cuniculus; identical to SEQ ID NO: 702

SEQ ID NO: 1709 - DNA, 236 bp, Oryctolagus cuniculus; identical to SEQ ID NO: 703

SEQ ID NO: 1710 - DNA, 233 bp, Oryctolagus cuniculus; identical to SEQ ID NO: 704

SEQ ID NO: 1711 - DNA, 237 bp, Sylvilagus bachmani; identical to SEQ ID NO: 705

SEQ ID NO: 1712 - DNA, 201 bp, Mus musculus; identical to SEQ ID NO: 790

SEQ ID NO: 1713 - DNA, 201 bp, Mus musculus; identical to SEQ ID NO: 796

SEQ ID NO: 1714 - DNA, 201 bp, Mus musculus; identical to SEQ ID NO: 798

SEQ ID NO: 1715 - DNA, 201 bp, Mus spretus; identical to SEQ ID NO: 799

SEQ ID NO: 1716 - DNA, 201 bp, Mus spicilegus; identical to SEQ ID NO: 800

SEQ ID NO: 1717 - DNA, 201 bp, Mus caroli; identical to SEQ ID NO: 802

SEQ ID NO: 1718 - DNA, 201 bp, Mus minutoides; identical to SEQ ID NO: 804

SEQ ID NO: 1719 - DNA, 201 bp, Mus minutoides; identical to SEQ ID NO: 806

SEQ ID NO: 1720 - DNA, 208 bp, Mus pahari; identical to SEQ ID NO: 807

SEQ ID NO: 1721 - DNA, 201 bp, Rattus rattus; identical to SEQ ID NO: 809

SEQ ID NO: 1722 - DNA, 201 bp, Rattus norvegicus; identical to SEQ ID NO: 811

SEQ ID NO: 1723 - DNA, 200 bp, Apodemus sylvaticus; identical to SEQ ID NO: 813

SEQ ID NO: 1724 - DNA, 238 bp, Apodemus speciosus; identical to SEQ ID NO: 814

SEQ ID NO: 1725 - DNA, 200 bp, Grammomys surdaster; identical to SEQ ID NO: 815

SEQ ID NO: 1726 - DNA, 200 bp, Arvicanthis niloticus; identical to SEQ ID NO: 816

SEQ ID NO: 1727 - DNA, 200 bp, Mastomys coucha; identical to SEQ ID NO: 817

SEQ ID NO: 1728 - DNA, 204 bp, Cricetulus griseus; identical to SEQ ID NO: 818

SEQ ID NO: 1729 - DNA, 212 bp, Mesocricetus auratus; identical to SEQ ID NO: 823

SEQ ID NO: 1730 - DNA, 202 bp, Phodopus sungorus; identical to SEQ ID NO: 824

SEQ ID NO: 1731 - DNA, 213 bp, Peromyscus maniculatus; identical to SEQ ID NO: 825

SEQ ID NO: 1732 - DNA, 213 bp, Peromyscus maniculatus; identical to SEQ ID NO: 826

SEQ ID NO: 1733 - DNA, 213 bp, Peromyscus polionotus; identical to SEQ ID NO: 827

SEQ ID NO: 1734 - DNA, 213 bp, Peromyscus leucopus; identical to SEQ ID NO: 828

SEQ ID NO: 1735 - DNA, 208 bp, Peromyscus californicus; identical to SEQ ID NO: 829

SEQ ID NO: 1736 - DNA, 205 bp, Onychomys torridus; identical to SEQ ID NO: 830

SEQ ID NO: 1737 - DNA, 205 bp, Peromyscus attwateri; identical to SEQ ID NO: 831

SEQ ID NO: 1738 - DNA, 202 bp, Sigmodon hispidus; identical to SEQ ID NO: 832

SEQ ID NO: 1739 - DNA, 201 bp, Acomys cahirinus; identical to SEQ ID NO: 833

SEQ ID NO: 1740 - DNA, 201 bp, Acomys russatus; identical to SEQ ID NO: 834

SEQ ID NO: 1741 - DNA, 193 bp, Psammomys obesus; identical to SEQ ID NO: 835

SEQ ID NO: 1742 - DNA, 194 bp, Rhombomys opimus; identical to SEQ ID NO: 836

SEQ ID NO: 1743 - DNA, 194 bp, Meriones unguiculatus; identical to SEQ ID NO: 837

SEQ ID NO: 1744 - DNA, 200 bp, Cricetomys gambianus; identical to SEQ ID NO: 842

SEQ ID NO: 1745 - DNA, 225 bp, Microtus agrestis; identical to SEQ ID NO: 843

SEQ ID NO: 1746 - DNA, 225 bp, Microtus agrestis; identical to SEQ ID NO: 845

SEQ ID NO: 1747 - DNA, 225 bp, Microtus oeconomus; identical to SEQ ID NO: 846

SEQ ID NO: 1748 - DNA, 224 bp, Microtus fortis; identical to SEQ ID NO: 847

SEQ ID NO: 1749 - DNA, 224 bp, Microtus arvalis; identical to SEQ ID NO: 848

SEQ ID NO: 1750 - DNA, 248 bp, Marmota marmota; identical to SEQ ID NO: 849

SEQ ID NO: 1751 - DNA, 248 bp, Marmota himalayana; identical to SEQ ID NO: 851

SEQ ID NO: 1752 - DNA, 248 bp, Marmota monax; identical to SEQ ID NO: 852

SEQ ID NO: 1753 - DNA, 247 bp, Marmota flaviventris; identical to SEQ ID NO: 854

SEQ ID NO: 1754 - DNA, 248 bp, Spermophilus dauricus; identical to SEQ ID NO: 855

SEQ ID NO: 1755 - DNA, 248 bp, Ictidomys tridecemlineatus; identical to SEQ ID NO: 856

SEQ ID NO: 1756 - DNA, 248 bp, Cynomys gunnisoni; identical to SEQ ID NO: 858

SEQ ID NO: 1757 - DNA, 248 bp, Urocitellus parryii; identical to SEQ ID NO: 859

SEQ ID NO: 1758 - DNA, 254 bp, Neosciurus carolinensis; identical to SEQ ID NO: 860

SEQ ID NO: 1759 - DNA, 254 bp, Sciurus vulgaris; identical to SEQ ID NO: 862

SEQ ID NO: 1760 - DNA, 254 bp, Xerus inauris; identical to SEQ ID NO: 863

SEQ ID NO: 1761 - DNA, 257 bp, Aplodontia rufa; identical to SEQ ID NO: 864

SEQ ID NO: 1762 - DNA, 254 bp, Pedetes capensis; identical to SEQ ID NO: 865

SEQ ID NO: 1763 - DNA, 238 bp, Muscardinus avellanarius; identical to SEQ ID NO: 866

SEQ ID NO: 1764 - DNA, 245 bp, Glis glis; identical to SEQ ID NO: 867

SEQ ID NO: 1765 - DNA, 264 bp, Graphiurus murinus; identical to SEQ ID NO: 868

SEQ ID NO: 1766 - DNA, 237 bp, Tympanoctomys barrerae; identical to SEQ ID NO: 869

SEQ ID NO: 1767 - DNA, 236 bp, Octomys mimax; identical to SEQ ID NO: 870

SEQ ID NO: 1768 - DNA, 238 bp, Octodon degus; identical to SEQ ID NO: 871

SEQ ID NO: 1769 - DNA, 241 bp, Ctenomys sociabilis; identical to SEQ ID NO: 872

SEQ ID NO: 1770 - DNA, 249 bp, Dolichotis patagonum; identical to SEQ ID NO: 873

SEQ ID NO: 1771 - DNA, 250 bp, Artificial Sequence; identical to SEQ ID NO: 874
  Description of Artificial Sequence: Synthetic polynucleotide

SEQ ID NO: 1772 - DNA, 250 bp, Hydrochoerus hydrochaeris; identical to SEQ ID NO: 876

SEQ ID NO: 1773 - DNA, 250 bp, Hydrochoerus hydrochaeris; identical to SEQ ID NO: 877

SEQ ID NO: 1774 - DNA, 250 bp, Hydrochoerus hydrochaeris; identical to SEQ ID NO: 878

SEQ ID NO: 1775 - DNA, 249 bp, Hydrochoerus hydrochaeris; identical to SEQ ID NO: 879

SEQ ID NO: 1776 - DNA, 251 bp, Cuniculus paca; identical to SEQ ID NO: 880

SEQ ID NO: 1777 - DNA, 250 bp, Dasyprocta punctata; identical to SEQ ID NO: 881

SEQ ID NO: 1778 - DNA, 237 bp, Dinomys branickii; identical to SEQ ID NO: 882

SEQ ID NO: 1779 - DNA, 252 bp, Erethizon dorsatum; identical to SEQ ID NO: 883

SEQ ID NO: 1780 - DNA, 251 bp, Chinchilla lanigera; identical to SEQ ID NO: 884

SEQ ID NO: 1781 - DNA, 260 bp, Heterocephalus glaber; identical to SEQ ID NO: 885

SEQ ID NO: 1782 - DNA, 260 bp, Heterocephalus glaber; identical to SEQ ID NO: 887

SEQ ID NO: 1783 - DNA, 252 bp, Fukomys damarensis; identical to SEQ ID NO: 888

SEQ ID NO: 1784 - DNA, 230 bp, Hystrix cristata; identical to SEQ ID NO: 890

SEQ ID NO: 1785 - DNA, 239 bp, Myocastor coypus; identical to SEQ ID NO: 891

SEQ ID NO: 1786 - DNA, 248 bp, Thryonomys swinderianus; identical to SEQ ID NO: 892

SEQ ID NO: 1787 - DNA, 256 bp, Petromus typicus; identical to SEQ ID NO: 893

SEQ ID NO: 1788 - DNA, 253 bp, Ctenodactylus gundi; identical to SEQ ID NO: 894

SEQ ID NO: 1789 - DNA, 240 bp, Castor canadensis; identical to SEQ ID NO: 895

SEQ ID NO: 1790 - DNA, 236 bp, Oryctolagus cuniculus; identical to SEQ ID NO: 703

SEQ ID NO: 1791 - DNA, 256 bp, Dipodomys stephensi; identical to SEQ ID NO: 900

SEQ ID NO: 1792 - DNA, 257 bp, Dipodomys ordii; identical to SEQ ID NO: 901

SEQ ID NO: 1793 - DNA, 245 bp, Perognathus longimembris; identical to SEQ ID NO: 902

SEQ ID NO: 1794 - DNA, 209 bp, Nannospalax galili; identical to SEQ ID NO: 903

SEQ ID NO: 1795 - DNA, 263 bp, Monodelphis domestica; identical to SEQ ID NO: 712

SEQ ID NO: 1796 - DNA, 272 bp, Sarcophilus harrisii; identical to SEQ ID NO: 714

SEQ ID NO: 1797 - DNA, 269 bp, Trichosurus vulpecula; identical to SEQ ID NO: 717

SEQ ID NO: 1798 - DNA, 269 bp, Trichosurus vulpecula; identical to SEQ ID NO: 718

SEQ ID NO: 1799 - DNA, 254 bp, Artificial Sequence; identical to SEQ ID NO: 522
  Description of Artificial Sequence: Synthetic polynucleotide

SEQ ID NO: 1800 - DNA, 261 bp, Artificial Sequence
  Description of Artificial Sequence: Synthetic polynucleotide
tgagcttccctccgtcctatgagccaaacaactgttggtcacattatataagaatcccatatataaagacatttctggcgtagggtgacttcccacaatacatagcgacatgcaaatatcatggtcctccaggaggcgtgcctccccgtccccttggtccaggtcttgctggggcgcacgcgcgctgcgtgttcccgctctgtgactcatctcgcgattcctgagagcggattggtgaagtcaatgttctggctccatggc

SEQ ID NO: 1801 - DNA, 394 bp, Orycteropus afer
tgagcttccctccgccctacggaacgaaactaacttggccaaactatataagaatgccatagctttcaacatttaatggttagggtgccttctcatagtttgcataactcattgccatcgagtcaattccgactcgtagcgaccgtatatgttatcaaaatcagggcagtggcaattatttctttggtaacttttctaaaaccatcttgaaatacatctttaaacaacaatacacagcgacatgcaaatatcatggcccttccaggaggcgtgcctccccgtcccgcgtgtgcgtcttgcttgtgcgcaggcgcgctgctcttccggctgtaagactttgagcccttgatttctgtgagcgggttcgtgaagtcagtgttctggctccatggcg

SEQ ID NO: 1802-1807 - skipped (6 entries)

SEQ ID NO: 1808 - DNA, 399 bp, Artificial Sequence
  Description of Artificial Sequence: Synthetic polynucleotide
tgagcttccctccgccctayggramraarykrwctyrkmcaramywtataagawtsccawakcywwmracatttmaygkttakggtgmyttcycatagtttgcataactcattgccatcgagtcaattccgactcgtagcgaccgtatatgttatcaaaatcagggcagtggcaattatttctttggtaacttttctaaaaccatcttgaaatacatctttaaacaasaayacayagcgacatgcaaatatcatggcccttcyrsrrggcgysmctcccckkyccsysacagyswkcktcytgcywgkgcgcasgcgcgctgsktsttccsgcykwrwgacwytgrgccckygattyctkkgagcgggttsrtgamgtcagygttckrrytccatggcg

SEQ ID NO: 1809 - DNA, 253 bp, Procyon lotor; identical to SEQ ID NO: 1503

SEQ ID NO: 1810 - DNA, 254 bp, Spilogale gracilis; identical to SEQ ID NO: 1504

SEQ ID NO: 1811-1867 - skipped (57 entries)

SEQ ID NO: 1868 - DNA, 256 bp, Artificial Sequence
  Description of Artificial Sequence: Synthetic polynucleotide
  modified_base (39)..(39): a, c, t, or g
  modified_base (145)..(145): a, c, t, or g
tgagcttccctccgccctatgrgraarrgtggtycyayncagaacttataagrytcccawayyyaaagacatttcwcgwttatggtgayttcccagaabacayagcgacatgcaaatattgyagggcgtsmcwcccctgtccctnacrgycrtcttcctgccagggcgcacgcgcgctgsgtgttcccgcstagtgacdctgggcccgcgattccttggagcgggttgatgacgtcagcgttcgaattccatggcg

SEQ ID NO: 1869 - DNA, 135 bp, Macaca nemestrina
cccaccccgcctctggaagagaaggcggatccctaacgccagctatctccaagagcaacattgccgcagcacttccgggacgtcgtgctgcgaaggacgcagatattatacgtcacttccacggcgcggcgttag

SEQ ID NO: 1870 - DNA, 135 bp, Colobus angolensis
cctgccccgcctctgggagagaaggcggatccctaacgccagctatctccaagagcgacattgcctcagcacttccgggacgtcgtactgcaaaggacgcagttattatacgtcacttccacggcgccgcgttag

SEQ ID NO: 1871 - DNA, 135 bp, Piliocolobus tephrosceles
cctgctccgcctctgggagagaaggcggatccttaacgccagctatctcctagagcaacattgcctcagcacttccgggacgtcgagctgcaaaggacgcagttattatacgtcacttccagggcgccgcgttag

SEQ ID NO: 1872 - DNA, 135 bp, Rhinopithecus bieti
cctgccccgcctctgggagagaaggcggatccctaacgccagctatctccaagagcgacattgcctcagcacttccgggacgtagtgctgcaaaggacgcagttattatacgtcacttccacggcgccgcgttag

SEQ ID NO: 1873 - DNA, 130 bp, Aotus nancymaae
cccgccccgcccctgggacagagggcggatctctaacgccaactatctccaagagcaacattgccgcagcacttccgggacgtcgtgctgcaaaggacgccgctattatacgtcacttccgcggctccag

SEQ ID NO: 1874 - DNA, 134 bp, Cebus capucinus
cccgccccgcccctgggagagagggcggatctctaacgccaactgtctccaagagcaacattgccgcagcacttccgggacgtcgtcctgcaaaggacgccgctattatacgtcacttctgctgctcactgtag

SEQ ID NO: 1875 - DNA, 135 bp, Saimiri boliviensis
cccgccccgcccctgggagagagggcggatctctaacgccaactatctccaagagcaacatttcagcagcacttccaggacgtcgccctgcaaaggacgccgctattatacgtcacttccgctgctccactctgg

SEQ ID NO: 1876 - DNA, 121 bp, Carlito syrichta
cctgccccgcctctagagaaggggacggattcgtaatgcccggcaatcgcgcagccgcatttccgggacgtcacgaggaaagggcgccgaattgtatgtcatttccgcttttcatggctgg

SEQ ID NO: 1877 - DNA, 122 bp, Otolemur garnettii
ctcggccagtctcaggcagaaagggcggaaaccggaccccagcgcaatgtcacggcagcacttccggtatgctccgttgcaaaagacgctgctattgtacgtcacttccgccacccggctgg

SEQ ID NO: 1878 - DNA, 133 bp, Prolemur simus
cccgccccgcctctcggagacggggcgcgtccctcccgccgccgtctcccggggcaacatggcggcagcacttccggggcgccggtggcgaaaggcgccgctattatacgtcacttccgccgcccggcgcgag

SEQ ID NO: 1879 - DNA, 240 bp, Artificial Sequence
  Description of Artificial Sequence: Synthetic polynucleotide
ggggagaaaggggcttcacgcggaatatataaggctcccgtacctaaaggcctttcacggttagggtgacttccccacaatacatagcgacatgcaaatatagttgggcgtgcctcccctgtcccttgcgggcatcttctcgccaggacacgcgcgcgccgcgctgcgtgttcccgccttttgacttccaggcgggcgaatcctgggagagggttggatgacgtccaacattcgggctcc

SEQ ID NO: 1880 - DNA, 10 bp, Artificial Sequence
  Description of Artificial Sequence: Synthetic oligonucleotide
accaccatgg

SEQ ID NO: 1881 - DNA, 10 bp, Artificial Sequence
  Description of Artificial Sequence: Synthetic oligonucleotide
gccaccatgg

SEQ ID NO: 1882 - DNA, 123 bp, Homo sapiens
tgagcttccctccgccctatgggaaaaagtggtctcatacagaacttataagattcccaaatccaaagacatttcacgtttatggtgatttcccagaacacatagcgacatgcaaatattgca

SEQ ID NO: 1883 - DNA, 133 bp, Homo sapiens
gggcgccactcccctgtccctcacagccatcttcctgccagggcgcacgcgcgctgggtgttcccgcctagtgacactgggcccgcgattccttggagcgggttgatgacgtcagcgttcgaattccatggcg

SEQ ID NO: 1884 - DNA, 256 bp, Homo sapiens; identical to SEQ ID NO: 771

SEQ ID NO: 1885 - DNA, 394 bp, Orycteropus afer; identical to SEQ ID NO: 1801

SEQ ID NO: 1886 - DNA, 165 bp, Artificial Sequence
  Description of Artificial Sequence: Synthetic polynucleotide
agaccggccgccactataaggctcgaaagaggaataaatttttcgtttagggtgatttcccacaaagcacagcgcgtaattgcatgcgctctaccccaggctcctgtgctagacaagaagcccgcgcatccgggcaagggatgatgacgtcgtccttcaagagcg

SEQ ID NO: 1887 - DNA, 155 bp, Artificial Sequence
  Description of Artificial Sequence: Synthetic polynucleotide
ccactataaggctcgaaagaggaataaatttttcgtttagggtgatttcccacaaagcacagcgcgtaattgcatgcgctctaccccaggctcctgtgctagacaagaagcccgcgcatccgggcaagggatgatgacgtcgtccttcaagagcg

SEQ ID NO: 1888 - DNA, 145 bp, Artificial Sequence
  Description of Artificial Sequence: Synthetic polynucleotide
gctcgaaagaggaataaatttttcgtttagggtgatttcccacaaagcacagcgcgtaattgcatgcgctctaccccaggctcctgtgctagacaagaagcccgcgcatccgggcaagggatgatgacgtcgtccttcaagagcg

SEQ ID NO: 1889 - DNA, 135 bp, Artificial Sequence
  Description of Artificial Sequence: Synthetic polynucleotide
ggaataaatttttcgtttagggtgatttcccacaaagcacagcgcgtaattgcatgcgctctaccccaggctcctgtgctagacaagaagcccgcgcatccgggcaagggatgatgacgtcgtccttcaagagcg

SEQ ID NO: 1890 - DNA, 125 bp, Artificial Sequence
  Description of Artificial Sequence: Synthetic polynucleotide
tttcgtttagggtgatttcccacaaagcacagcgcgtaattgcatgcgctctaccccaggctcctgtgctagacaagaagcccgcgcatccgggcaagggatgatgacgtcgtccttcaagagcg

SEQ ID NO: 1891 - DNA, 115 bp, Artificial Sequence
  Description of Artificial Sequence: Synthetic polynucleotide
ggtgatttcccacaaagcacagcgcgtaattgcatgcgctctaccccaggctcctgtgctagacaagaagcccgcgcatccgggcaagggatgatgacgtcgtccttcaagagcg

SEQ ID NO: 1892 - DNA, 105 bp, Artificial Sequence
  Description of Artificial Sequence: Synthetic polynucleotide
cacaaagcacagcgcgtaattgcatgcgctctaccccaggctcctgtgctagacaagaagcccgcgcatccgggcaagggatgatgacgtcgtccttcaagagcg

SEQ ID NO: 1893 - DNA, 120 bp, Artificial Sequence
  Description of Artificial Sequence: Synthetic polynucleotide
acatcctgaaagaccggccgccactataaggctcgaaagaggaataaatttttcgtttagggtgatttcccacaaagcacagcgcgtaattgcatgcgctctaccccaggctcctgtgct

SEQ ID NO: 1894 - DNA, 175 bp, Artificial Sequence
  Description of Artificial Sequence: Synthetic polynucleotide
ttcaggatgtcggccggtctccactataaggctcgaaagaggaataaatttttcgtttagggtgatttcccacaaagcacagcgcgtaattgcatgcgctctaccccaggctcctgtgctagacaagaagcccgcgcatccgggcaagggatgatgacgtcgtccttcaagagcg

SEQ ID NO: 1895 - DNA, 175 bp, Artificial Sequence
  Description of Artificial Sequence: Synthetic polynucleotide
ttcaggatgtagaccggccgcttatagtgggctcgaaagaggaataaatttttcgtttagggtgatttcccacaaagcacagcgcgtaattgcatgcgctctaccccaggctcctgtgctagacaagaagcccgcgcatccgggcaagggatgatgacgtcgtccttcaagagcg

SEQ ID NO: 1896 - DNA, 175 bp, Artificial Sequence
  Description of Artificial Sequence: Synthetic polynucleotide
ttcaggatgtagaccggccgccactataagtctttcgagcggaataaatttttcgtttagggtgatttcccacaaagcacagcgcgtaattgcatgcgctctaccccaggctcctgtgctagacaagaagcccgcgcatccgggcaagggatgatgacgtcgtccttcaagagcg

SEQ ID NO: 1897 - DNA, 175 bp, Artificial Sequence
  Description of Artificial Sequence: Synthetic polynucleotide
ttcaggatgtagaccggccgccactataaggctcgaaagaaatttattcctttcgtttagggtgatttcccacaaagcacagcgcgtaattgcatgcgctctaccccaggctcctgtgctagacaagaagcccgcgcatccgggcaagggatgatgacgtcgtccttcaagagcg

SEQ ID NO: 1898 - DNA, 175 bp, Artificial Sequence
  Description of Artificial Sequence: Synthetic polynucleotide
ttcaggatgtagaccggccgccactataaggctcgaaagaggaataaattctaaacgaaaggtgatttcccacaaagcacagcgcgtaattgcatgcgctctaccccaggctcctgtgctagacaagaagcccgcgcatccgggcaagggatgatgacgtcgtccttcaagagcg

SEQ ID NO: 1899 - DNA, 175 bp, Artificial Sequence
  Description of Artificial Sequence: Synthetic polynucleotide
ttcaggatgtagaccggccgccactataaggctcgaaagaggaataaatttttcgtttagggaaatcacccacaaagcacagcgcgtaattgcatgcgctctaccccaggctcctgtgctagacaagaagcccgcgcatccgggcaagggatgatgacgtcgtccttcaagagcg

SEQ ID NO: 1900 - DNA, 175 bp, Artificial Sequence
  Description of Artificial Sequence: Synthetic polynucleotide
ttcaggatgtagaccggccgccactataaggctcgaaagaggaataaatttttcgtttagggtgatttccgtgctttgtgagcgcgtaattgcatgcgctctaccccaggctcctgtgctagacaagaagcccgcgcatccgggcaagggatgatgacgtcgtccttcaagagcg

SEQ ID NO: 1901 - DNA, 175 bp, Artificial Sequence
  Description of Artificial Sequence: Synthetic polynucleotide
ttcaggatgtagaccggccgccactataaggctcgaaagaggaataaatttttcgtttagggtgatttcccacaaagcacattacgcgcttgcatgcgctctaccccaggctcctgtgctagacaagaagcccgcgcatccgggcaagggatgatgacgtcgtccttcaagagcg

SEQ ID NO: 1902 - DNA, 175 bp, Artificial Sequence
  Description of Artificial Sequence: Synthetic polynucleotide
ttcaggatgtagaccggccgccactataaggctcgaaagaggaataaatttttcgtttagggtgatttcccacaaagcacagcgcgtaatagcgcatgcactaccccaggctcctgtgctagacaagaagcccgcgcatccgggcaagggatgatgacgtcgtccttcaagagcg

SEQ ID NO: 1903 - DNA, 175 bp, Artificial Sequence
  Description of Artificial Sequence: Synthetic polynucleotide
ttcaggatgtagaccggccgccactataaggctcgaaagaggaataaatttttcgtttagggtgatttcccacaaagcacagcgcgtaattgcatgcgctcctggggtagctcctgtgctagacaagaagcccgcgcatccgggcaagggatgatgacgtcgtccttcaagagcg

SEQ ID NO: 1904 - DNA, 175 bp, Artificial Sequence
  Description of Artificial Sequence: Synthetic polynucleotide
ttcaggatgtagaccggccgccactataaggctcgaaagaggaataaatttttcgtttagggtgatttcccacaaagcacagcgcgtaattgcatgcgctctaccccaggagcacaggagagacaagaagcccgcgcatccgggcaagggatgatgacgtcgtccttcaagagcg

SEQ ID NO: 1905 - DNA, 175 bp, Artificial Sequence
  Description of Artificial Sequence: Synthetic polynucleotide
ttcaggatgtagaccggccgccactataaggctcgaaagaggaataaatttttcgtttagggtgatttcccacaaagcacagcgcgtaattgcatgcgctctaccccaggctcctgtgctcttcttgtctcccgcgcatccgggcaagggatgatgacgtcgtccttcaagagcg

SEQ ID NO: 1906 - DNA, 175 bp, Artificial Sequence
  Description of Artificial Sequence: Synthetic polynucleotide
ttcaggatgtagaccggccgccactataaggctcgaaagaggaataaatttttcgtttagggtgatttcccacaaagcacagcgcgtaattgcatgcgctctaccccaggctcctgtgctagacaagaaggatgcgcgggcgggcaagggatgatgacgtcgtccttcaagagcg

SEQ ID NO: 1907 - DNA, 175 bp, Artificial Sequence
  Description of Artificial Sequence: Synthetic polynucleotide
ttcaggatgtagaccggccgccactataaggctcgaaagaggaataaatttttcgtttagggtgatttcccacaaagcacagcgcgtaattgcatgcgctctaccccaggctcctgtgctagacaagaagcccgcgcatccccttgcccgatgatgacgtcgtccttcaagagcg

SEQ ID NO: 1908 - DNA, 175 bp, Artificial Sequence
  Description of Artificial Sequence: Synthetic polynucleotide
ttcaggatgtagaccggccgccactataaggctcgaaagaggaataaatttttcgtttagggtgatttcccacaaagcacagcgcgtaattgcatgcgctctaccccaggctcctgtgctagacaagaagcccgcgcatccgggcaagggacgtcatcatcgtccttcaagagcg

SEQ ID NO: 1909 - DNA, 175 bp, Artificial Sequence
  Description of Artificial Sequence: Synthetic polynucleotide
ttcaggatgtagaccggccgccactataaggctcgaaagaggaataaatttttcgtttagggtgatttcccacaaagcacagcgcgtaattgcatgcgctctaccccaggctcctgtgctagacaagaagcccgcgcatccgggcaagggatgatgacgtttgaaggacggagcg

SEQ ID NO: 1910 - DNA, 280 bp, Artificial Sequence
  Description of Artificial Sequence: Synthetic polynucleotide
gggaaaaagtggtctcatacagaacttmkaagattcccaaatccaaagacatttcacgtttatggtgatttcccagaacacatagcgacatgcaaatattgcagggcgccactcccctgtccctcacagccatcttcctgccagggcgcacgcgcgctgggtgttcccgcctagtgacactgggcccgcgattccttggagcgggttgatgacgtcagcgttcgaattccrcmdyyrcytctgacacaactgtgttcactagcaacctcaaacagacacc

SEQ ID NO: 1911 - DNA, 230 bp, Homo sapiens; identical to SEQ ID NO: 87

SEQ ID NO: 1912 - DNA, 239 bp, Artificial Sequence
  Description of Artificial Sequence: Synthetic polynucleotide
gggaaaaagtggtctcatacagaacttataagattcccaaatccaaagacatttcacgtttatggtgatttcccagaacacatagcgacatgcaaatattgcagggcgccactcccctgtccctcacagccatcttcctgccagggcgcacgcgcgctgggtgttcccgcctagtgacactgggcccgcgattccttggagcgggttgatgacgtcagcgttcgaattccgccgccacc

SEQ ID NO: 1913 - DNA, 280 bp, Artificial Sequence
  Description of Artificial Sequence: Synthetic polynucleotide
gggaaaaagtggtctcatacagaacttataagattcccaaatccaaagacatttcacgtttatggtgatttcccagaacacatagcgacatgcaaatattgcagggcgccactcccctgtccctcacagccatcttcctgccagggcgcacgcgcgctgggtgttcccgcctagtgacactgggcccgcgattccttggagcgggttgatgacgtcagcgttcgaattccacatttgcttctgacacaactgtgttcactagcaacctcaaacagacacc

SEQ ID NO: 1914 - DNA, 236 bp, Artificial Sequence
  Description of Artificial Sequence: Synthetic polynucleotide
gggaaaaagtggtctcatacagaacttcgaagattcccaaatccaaagacatttcacgtttatggtgatttcccagaacacatagcgacatgcaaatattgcagggcgccactcccctgtccctcacagccatcttcctgccagggcgcacgcgcgctgggtgttcccgcctagtgacactgggcccgcgattccttggagcgggttgatgacgtcagcgttcgaattccgccacc

SEQ ID NO: 1915 - DNA, 225 bp, Artificial Sequence
  Description of Artificial Sequence: Synthetic polynucleotide
ttcaggatgtagaccggccgccactmkaaggctcgaaagaggaataaatttttcgtttagggtgatttcccacaaagcacagcgcgtaattgcatgcgctctaccccaggctcctgtgctagacaagaagcccgcgcatccgggcaagggatgatgacgtcgtccttcaagagcgrcmdyyrcytctgacacaactgtgttcactagcaacctcaaacagacacc

SEQ ID NO: 1916 - DNA, 175 bp, Mus musculus; identical to SEQ ID NO: 93

SEQ ID NO: 1917 - DNA, 184 bp, Artificial Sequence
  Description of Artificial Sequence: Synthetic polynucleotide
ttcaggatgtagaccggccgccactataaggctcgaaagaggaataaatttttcgtttagggtgatttcccacaaagcacagcgcgtaattgcatgcgctctaccccaggctcctgtgctagacaagaagcccgcgcatccgggcaagggatgatgacgtcgtccttcaagagcggccgccacc

SEQ ID NO: 1918 - DNA, 225 bp, Artificial Sequence
  Description of Artificial Sequence: Synthetic polynucleotide
ttcaggatgtagaccggccgccactataaggctcgaaagaggaataaatttttcgtttagggtgatttcccacaaagcacagcgcgtaattgcatgcgctctaccccaggctcctgtgctagacaagaagcccgcgcatccgggcaagggatgatgacgtcgtccttcaagagcgacatttgcttctgacacaactgtgttcactagcaacctcaaacagacacc

SEQ ID NO: 1919 - DNA, 181 bp, Artificial Sequence
  Description of Artificial Sequence: Synthetic polynucleotide
ttcaggatgtagaccggccgccactcgaaggctcgaaagaggaataaatttttcgtttagggtgatttcccacaaagcacagcgcgtaattgcatgcgctctaccccaggctcctgtgctagacaagaagcccgcgcatccgggcaagggatgatgacgtcgtccttcaagagcggccacc

SEQ ID NO: 1920 - RNA, 15 nt, Artificial Sequence
  Description of Artificial Sequence: Synthetic oligonucleotide
aaaaaaaaaaaaaaa

What is claimed is:

1. A nucleic acid comprising a compact promoter operably linked to a coding sequence of a large gene, wherein the compact promoter is between 50 and 250 bp, and wherein the coding sequence of the large gene is greater than about 4110 bp.

2. The nucleic acid of claim 1, wherein the compact promoter is between 50 and 225 bp.

3. The nucleic acid of claim 1, wherein the compact promoter is between 50 and 200 bp.

4. The nucleic acid of claim 1, wherein the compact promoter is between 50 and 180 bp.

5. The nucleic acid of any preceding claim, wherein the compact promoter comprises a nucleic acid sequence selected from SEQ ID NOs: 107-255 or the portion of any one of SEQ ID NOs: 25-106, 469-476, 559-564, 609-614, 673-678, 681, 692-697, 706-711, 719-724, 729-734, 748-753, 784-789, 904-909, 920-925, 936-1303 or any sequence in FIGS. 3-19 that corresponds to an H1 promoter (e.g., from about nucleotide 20 to about nucleotide 490 as numbered in FIG. 3), or a nucleic acid sequence having at least about 80%, at least about 85%, at least about 90%, at least about 95%, at least about 98%, at least about 99%, or at least about 99.5% identity thereto.

6. The nucleic acid of any preceding claim, wherein the compact promoter comprises an H1 promoter.

7. The nucleic acid of claim 6, wherein the H1 promoter is selected from the portion of any one of SEQ ID NOs: 25-106, 469-476, 559-564, 609-614, 673-678, 681, 692-697, 706-711, 719-724, 729-734, 748-753, 784-789, 904-909, 920-925, 936-1303 or any sequence in FIGS. 3-19 that corresponds to the H1 promoter (e.g., from about nucleotide 20 to about nucleotide 490 as numbered in FIG. 3), or a promoter having at least about 80%, at least about 85%, at least about 90%, at least about 95%, at least about 98%, at least about 99%, or at least about 99.5% identity thereto.

8. The nucleic acid of claim 6 or 7, wherein the H1 promoter comprises a human H1 promoter.

9. The nucleic acid of any one of claims 1-5, wherein the compact promoter comprises a Gar1 promoter.

10. The nucleic acid of claim 9, wherein the Gar1 promoter is selected from SEQ ID NOs: 107-203, or a promoter having at least about 80%, at least about 85%, at least about 90%, at least about 95%, at least about 98%, at least about 99%, or at least about 99.5% identity thereto.

11. The nucleic acid of claim 9 or 10, wherein the Gar1 promoter is a human Gar1 promoter.

12. The nucleic acid of any one of claims 1-5, wherein the compact promoter comprises a bidirectional promoter selected from SEQ ID NOs: 204-255, or a promoter having at least about 80%, at least about 85%, at least about 90%, at least about 95%, at least about 98%, at least about 99%, or at least about 99.5% identity thereto.

13. The nucleic acid of any preceding claim, wherein the compact promoter does not comprise a viral promoter and/or a synthetic promoter.

14. The nucleic acid of any preceding claim, wherein the compact promoter does not comprise F5tg83.

15. The nucleic acid of any preceding claim, wherein the compact promoter comprises at least 95%, 98%, 99%, 99.5% or 100% identity to a naturally-occurring mammalian promoter.

16. The nucleic acid of any preceding claim, wherein the compact promoter is capable of expressing a luciferase reporter at a higher level than is a HSK thymidine kinase (TK) promoter.

17. The nucleic acid of any preceding claim, wherein the coding sequence encodes a cystic fibrosis transmembrane conductance regulator (CFTR), ATP7B, ATP7A, AGL, CPS1, or a functional fragment or variant thereof.

18. The nucleic acid of any preceding claim, wherein the coding sequence encodes a cystic fibrosis transmembrane conductance regulator (CFTR).

19. The nucleic acid of claim 17 or 18, wherein the CFTR coding sequence is codon optimized.

20. The nucleic acid of claim 19, wherein the codon-optimized CFTR coding sequence comprises one or more of the following features as compared to a wild type CFTR coding sequence:
(a) fewer unpaired base pairs of mRNA;
(b) increased codon usage bias;
(c) decreased GC content;
(d) fewer CpG dinucleotides;
(e) increased mRNA secondary structure;
(f) fewer cryptic splicing sites;
(g) fewer premature poly(A) sites;
(h) fewer RNA instability motifs;
(i) fewer AT-rich elements (ARE);
(j) fewer repeat sequences (e.g., direct repeat, reverse repeat, and dyad repeat);
(k) fewer GC peaks; and
(l) fewer cis-acting elements.

21. The nucleic acid of any preceding claim, wherein the CFTR coding sequence comprises a truncated form of a wild-type CFTR gene.

22. The nucleic acid of claim 21, wherein the truncated form of the wild-type CFTR gene comprises CTFRΔR.

23. An expression construct comprising the nucleic acid of any preceding claim.

24. The expression construct of claim 23, wherein the coding sequence can be expressed in a target cell.

25. The expression construct of claim 24, wherein the target cell is a lung cell, a pancreatic cell, a liver cell, or a neuronal cell.

26. The expression construct of claim 23 or 24, wherein the expression construct can be expressed in Calu-3, CFBE4lo−, or A549 cells.

27. The expression construct of claim 23 or 24, wherein the expression construct can be expressed in HEK293 cells.

28. The expression construct of claim 23 or 24, wherein the expression construct can be expressed in HeLa cells.

29. The expression construct of claim 23 or 24, wherein the coding sequence encodes a CFTR, and, when the expression construct is expressed in an epithelial cell, the expressed CFTR protein causes an increase in transepithelial electrical resistance as compared to a cell in which the expression construct is not present.

30. The expression construct of any one of claims 23, 24, and 29, wherein the coding sequence encodes a CFTR, and, when the expression construct is expressed in an epithelial cell, the expressed CFTR protein causes an increase in transepithelial Cl⁻ transport as compared to a cell in which the expression construct is not present.

31. A vector comprising the expression construct of any one of claims 23-30.

32. The vector of claim 31, wherein the vector comprises an adeno-associated viral (AAV) vector.

33. The vector of claim 32, wherein the AAV vector comprises an AAV-6 vector.

34. A method of expressing a protein in a cell, the method comprising transfecting a cell with the expression construct of any one of claims 23-30 or the vector of any one of claims 31-33.

35. A method of treating a disease (e.g., cystic fibrosis, Wilson disease, Menkes disease, Cori Disease, or carbamoyl phosphate synthetase I deficiency (CPS1D)) in a subject in need thereof, the method comprising administering to the subject a vector of any one of claims 31-33.

36. A nucleic acid comprising a cystic fibrosis transmembrane conductance regulator (CFTR) coding sequence, wherein the CFTR coding sequence is codon-optimized, wherein the CFTR coding sequence comprises one or more of the following features as compared to a wild type CFTR coding sequence:
(a) fewer unpaired base pairs of mRNA;
(b) increased codon usage bias;
(c) decreased GC content;
(d) fewer CpG dinucleotides;
(e) increased mRNA secondary structure;
(f) fewer cryptic splicing sites;
(g) fewer premature poly(A) sites;
(h) fewer RNA instability motifs;
(i) fewer AT-rich elements (ARE);
(j) fewer repeat sequences (e.g., direct repeat, reverse repeat, and dyad repeat);
(k) fewer GC peaks; and
(l) fewer cis-acting elements.

37. The nucleic acid of claim 20 or claim 36, wherein the codon usage bias is determined using the codon adaptive index (CAI).

38. The nucleic acid of claim 37, wherein the CAI score is greater than about 0.70.

39. The nucleic acid of any one of claims 20 and 36-38, wherein the frequency of optimal codons (FOP) is greater than about 80%.

40. The nucleic acid of any one of claims 20 and 36-39, wherein the cis-acting element is selected from the group consisting of splice donors/acceptors (e.g., GGTAAG, GGTGAT, GTAAAA, GTAAGT), PolyA (e.g., AATAAA, ATTAAA, AAAAAAA), destabilizing motifs (e.g., ATTTA), AT-rich elements (e.g., ATTTTA, ATTTTTA, ATTTTTTA), PolyT, polymerase slippage sites (e.g., GGGGGG, CCCCCC), and internal Kozak sequences (e.g., ACCACCATGG, GCCACCATGG).

41. The nucleic acid of any one of claims 20 and 36-40, wherein the nucleic acid further comprises a 3′UTR, a 5′UTR or a 3′UTR and a 5′UTR.

42. The nucleic acid of claim 41, wherein the minimum free energy structure of the nucleic acid comprising the 3′UTR, the 5′UTR or the 3′UTR and the 5′UTR does not favor base-pairing between (a) the 3′UTR, the 5′UTR or the 3′UTR and the 5′UTR and (b) the CFTR coding sequence.

43. An expression construct comprising the nucleic acid of any one of claims 36-42.

44. The expression construct of claim 43, wherein the half-life of the mRNA expressed from the codon optimized CFTR coding sequence is increased as compared to a wild-type CFTR coding sequence.

45. The expression construct of any one of claims 43-44, wherein expression of the codon optimized CFTR coding sequence results in an increased amount of CFTR mRNA or protein as compared to expression of a wild-type CFTR coding sequence.

46. The expression construct of any one of claims 43-45, wherein the CFTR coding sequence can be expressed in the lung and/or the pancreas.

47. The expression construct of any one of claims 43-46, wherein the expression construct can be expressed in HEK293 or A549 cells.

48. The expression construct of any one of claims 43-46, wherein, when the expression construct is expressed in an epithelial cell, the expressed CFTR protein causes an increase in transepithelial electrical resistance as compared to a cell in which the expression construct is not present.

49. The expression construct of any one of claims 43-46 and 48, wherein, when the expression construct is expressed in an epithelial cell, the expressed CFTR protein causes an increase in transepithelial Cl⁻ transport as compared to a cell in which the expression construct is not present.

50. A vector comprising the expression construct of any one of claims 43-49.

51. The vector of claim 50, wherein the vector comprises an adeno-associated viral (AAV) vector.

52. The vector of claim 51, wherein the AAV vector comprises an AAV-6 vector.

53. A method of expressing a CFTR protein in a cell, the method comprising transfecting a cell with the expression construct of any one of claims 43-49 or the vector of any one of claims 50-52.

54. A method of treating cystic fibrosis in a subject in need thereof, the method comprising administering to the subject a vector of any one of claims 46-49.

55. A nucleic acid comprising:
a) a compact bidirectional promoter;
b) a protein coding gene; and
c) a second gene;
wherein the compact bidirectional promoter has a size between 50 and 250 bp, comprises at least one regulatory element that provides for transcription of the protein coding gene in one direction and at least one regulatory element that provides for transcription of the second gene in the other direction, wherein the protein coding gene comprises a coding sequence from about 300 bp to about 4110 bp.

56. The nucleic acid of claim 55, wherein the compact bidirectional promoter is between 50 and 225 bp.

57. The nucleic acid of claim 55, wherein the compact bidirectional promoter is between 50 and 200 bp.

58. The nucleic acid of claim 55, wherein the compact bidirectional promoter is between 50 and 180 bp.

59. The nucleic acid of any one of claims 55-58, wherein the second gene encodes an RNA or a second protein.

60. The nucleic acid of any one of claims 55-60, wherein the compact bidirectional promoter comprises an H1 promoter.

61. The nucleic acid of claim 60, wherein the H1 promoter comprises a human H1 promoter.

62. The nucleic acid of any one of claims 55-61, wherein the coding sequence encodes a cystic fibrosis transmembrane conductance regulator (CFTR), ATP7B, ATP7A, AGL, CPS1, or a functional fragment or variant thereof.

63. The nucleic acid of any one of claims 55-61, wherein the coding sequence encodes a cystic fibrosis transmembrane conductance regulator (CFTR).

64. The nucleic acid of claim 62 or 63, wherein the CFTR coding sequence is codon optimized.

65. The nucleic acid of claim 64, wherein the codon-optimized CFTR coding sequence comprises one or more of the following features as compared to a wild type CFTR coding sequence:
(a) fewer unpaired base pairs of mRNA;
(b) increased codon usage bias;
(c) decreased GC content;
(d) fewer CpG dinucleotides;
(e) increased mRNA secondary structure;
(f) fewer cryptic splicing sites;
(g) fewer premature poly(A) sites;
(h) fewer RNA instability motifs;
(i) fewer AT-rich elements (ARE);
(j) fewer repeat sequences (e.g., direct repeat, reverse repeat, and dyad repeat);
(k) fewer GC peaks; and
(l) fewer cis-acting elements.

66. The nucleic acid of any one of claims 62-65, wherein the CFTR coding sequence comprises a truncated form of a wild-type CFTR gene.

67. The nucleic acid of claim 66, wherein the truncated form of the wild-type CFTR gene comprises CTFRΔR.

68. An expression construct comprising the nucleic acid of any one of claims 55-67.

69. The expression construct of claim 68, wherein the coding sequence can be expressed in a target cell.

70. The expression construct of claim 69, wherein the target cell is a lung cell, a pancreatic cell, a liver cell, or a neuronal cell.

71. The expression construct of claim 68 or 69, wherein the expression construct can be expressed in Calu-3, CFBE4lo−, or A549 cells.

72. The expression construct of claim 68 or 69, wherein the expression construct can be expressed in HEK293 cells.

73. The expression construct of claim 68 or 69, wherein the expression construct can be expressed in HeLa cells.

74. The expression construct of claim 68 or 69, wherein the coding sequence encodes a CFTR, and, when the expression construct is expressed in an epithelial cell, the expressed CFTR protein causes an increase in transepithelial electrical resistance as compared to a cell in which the expression construct is not present.

75. The expression construct of any one of claim 68, 69, and 74, wherein the coding sequence encodes a CFTR, and, when the expression construct is expressed in an epithelial cell, the expressed CFTR protein causes an increase in transepithelial Cl⁻ transport as compared to a cell in which the expression construct is not present.

76. A vector comprising the expression construct of any one of claims 68-75.

77. The vector of claim 76, wherein the vector comprises an adeno-associated viral (AAV) vector.

78. The vector of claim 77, wherein the AAV vector comprises an AAV-6 vector.
